(19) United States
(12) Patent Application Publication
(10) Pub. No.: US 2023/0302119 A1
(43) Pub. Date: Sep. 28, 2023

(54) Stabilized Corona Virus Spike Protein Fusion Proteins

(71) Applicant: Janssen Pharmaceuticals, Inc., Titusville, NJ (US)

(72) Inventors: Johannes Petrus Maria LANGEDIJK, Amsterdam (NL); Lucy RUTTEN, Rijnsburg (NL); Jaroslaw JURASZEK, Den Haag (NL)

(21) Appl. No.: 18/004,343

(22) PCT Filed: Jul. 5, 2021
(86) PCT No.: PCT/EP2021/068505

§ 371 Date: Jan. 5, 2023

Related U.S. Application Data
(60) Provisional application No. 62/705,584, filed on Jul. 6, 2020.

(51) Int. Cl. A61K 39/215; C12N 15/86

(52) U.S. Cl. CPC A61K 39/215; C12N 15/86; A61K 2039/53

(57) ABSTRACT

The present invention provides stabilized recombinant pre-fusion SARS CoV0-2 S proteins, nucleic acids molecules encoding the SARS CoV-2 S proteins and uses thereof.

[0001] The present invention relates to the field of medicine. The invention, in particular, relates to stabilized recombinant pre-fusion Corona virus spike (S) proteins, in particular to SARS CoV-2 S proteins, to nucleic acid molecules encoding said SARS CoV-2 S proteins, and uses thereof, e.g. in vaccines.

### BACKGROUND OF THE INVENTION

[0002] Corona viruses (CoVs) are enveloped viruses responsible for mild respiratory tract infections and atypical pneumonia in humans. CoVs are a large family of enveloped, single-stranded positive-sense RNA viruses belonging to the order Nidovirales, which can infect a broad range of mammalian and avian species, causing respiratory or enteric diseases. Corona viruses possess large, trimeric spike glycoproteins (S) that mediate binding to host cell receptors as well as fusion of viral and host cell membranes.

[0003] SARS-CoV-2 is a corona virus that emerged in humans from an animal reservoir in 2019 and rapidly spreads globally. SARS-CoV-2 is a beta-coronavirus, like MERS-CoV and SARS-CoV, all of which have their origin in bats. The name of the disease caused by the virus is corona virus disease 2019, abbreviated as COVID-19. Symptoms of COVID-19 range from mild symptoms to severe illness and death for confirmed COVID-19 cases. In the case of SARS-CoV-2 the S protein is the major surface protein. The S protein forms homotrimers and is composed of an N-terminal S1 subunit and a C-terminal S2 subunit, responsible for receptor binding and membrane fusion, respectively. Recent cryo-EM reconstructions of the CoV trimeric S structures of alpha-, beta-, and deltacoronaviruses revealed that the S1 subunit comprises two distinct domains: an N-terminal domain (S1 NTD) and a receptor-binding domain (S1 RBD). SARS-CoV-2 makes use of its S1 RBD to bind to human angiotensin-converting enzyme 2 (ACE2) (Hoffmann et. al. (2020); Wrapp et. al. (2020)).

[0004] Corona viridae S proteins are classified as class I fusion proteins and are responsible for fusion. The S protein fuses the viral and host cell membranes by irreversible protein refolding from the labile pre-fusion conformation to the stable post-fusion conformation. Like many other class I fusion proteins, Corona virus S protein requires receptor binding and cleavage for the induction of conformational change that is needed for fusion and entry (Belouzard et al. (2009); Follis et al. (2006); Bosch et al. (2008), Madu et al. (2009); Walls et al. (2016)). Priming of SARS-CoV2 involves cleavage of the S protein by furin at a furin cleavage site at the boundary between the S1 and S2 subunits (S ⅟S2), and by TMPRSS2 at a conserved site upstream of the fusion peptide (S2′) (Bestle et al. (2020); Hoffmann et. al. (2020)).

[0005] In order to refold from the pre-fusion to the post-fusion conformation, there are two regions that need to refold, which are referred to as the refolding region 1 (RR1) and refolding region 2 (RR2) (FIG. 1). For all class I fusion proteins, the RR1 includes the fusion protein (FP) and heptad repeat 1 (HR1). After cleavage and receptor binding the stretch of helices, loops and strands of all three protomers in the trimer transform to a long continuous trimeric helical coiled coil. The FP, located at the N-terminal segment of RR1, is then able to extend away from the viral membrane and inserts in the proximal membrane of the target cell. Next, the refolding region 2 (RR2), which is located C-terminal to RR1, and closer to the transmembrane region (TM) and which includes the heptad repeat 2 (HR2), relocates to the other side of the fusion protein and binds the HR1 coiled-coil trimer with the HR2 domain to form the six-helix bundle (6HB).

[0006] When viral fusion proteins, like the SARS CoV-2 S protein, are used as vaccine components, the fusogenic function of the proteins is not important. In fact, only the mimicry of the vaccine component to the virus is important to induce reactive antibodies that can bind the virus. Therefore, for development of robust efficacious vaccine components it is desirable that the meta-stable fusion proteins are maintained in their pre-fusion conformation. It is believed that a stabilized fusion protein, such as a SARS CoV-2 S protein, in the pre-fusion conformation can induce an efficacious immune response.

[0007] In recent years several attempts have been made to stabilize various class I fusion proteins, including Corona virus S proteins. A particularly successful approach was shown to be the stabilization of the so-called hinge loop at the end of RR1 preceding the base helix (WO2017/037196, Krarup et al. (2015); Rutten et al. (2020), Hastie et al. (2017)). This approach has also proved successful for Corona virus S proteins, as shown for SARS-CoV, MERS-CoV and SARS-CoV2 (Pallesen et al. (2016); Wrapp et al. (2020)). Although the proline mutations in the hinge loop indeed increase the expression of the Corona virus S protein, the S protein may still suffer from instability. Thus, for improved vaccine design or S proteins which can for example be used as tools, e.g. as a bait for monoclonal antibody isolation, further stabilization is desired.

[0008] Since the novel SARS-CoV-2 virus was first observed in humans in late 2019, millions of people have been infected and more than hundreds of thousands have died as a result of COVID-19, in particular because SARS-CoV-2, and corona viruses more generally, lack effective treatment. In addition, there is currently no vaccine available to prevent coronavirus induced disease (COVID-19), leading to a large unmet medical need. Since emerging infectious diseases, such as COVID-19, present a major threat to public health and economic systems, there is an urgent need for novel components that can be used e.g. in vaccines to prevent coronavirus induced respiratory disease.

### SUMMARY OF THE INVENTION

[0009] The present invention provides stabilized, recombinant, pre-fusion SARS CoV-2 S proteins, i.e. SARS CoV-2 S proteins that are stabilized in the pre-fusion conformation, and fragments thereof.

[0010] In certain embodiments, the pre-fusion SARS CoV-2 S proteins are soluble proteins, preferably trimeric soluble proteins.

[0011] The invention also provides nucleic acid molecules encoding the pre-fusion SARS CoV-2 S proteins and fragments thereof, as well as vectors, e.g. adenovectors, comprising such nucleic acid molecules.

[0012] The invention further provides methods of stabilizing SARS-CoV2 S proteins in the pre-fusion conformation, and to the pre-fusion SARS CoV-2 S proteins obtainable by said methods.

[0013] The invention moreover provides compositions, preferably immunogenic compositions, comprising a SARS-CoV-2 S protein, or a fragment thereof, a nucleic acid molecule and/or a vector, as described herein.

[0014] The invention also provides compositions for use in inducing an immune response against SARS CoV-2 S protein, and in particular to the use thereof as a vaccine against SARS-CoV-2 associated disease, such as COVID-19.

[0015] The invention also relates to methods for inducing an immune response against SARS CoV-2 in a subject, comprising administering to the subject an effective amount of a pre-fusion SARS CoV-2 S protein or a fragment thereof, a nucleic acid molecule encoding said SARS CoV-2 S protein, and/or a vector comprising said nucleic acid molecule, as described herein. Preferably, the induced immune response is characterized by the induction of neutralizing antibodies to the SARS CoV-2 virus and/or protective immunity against the SARS CoV-2 virus.

[0016] In particular aspects, the invention relates to methods for inducing anti-SARS CoV-2 S protein antibodies in a subject, comprising administering to the subject an effective amount of an immunogenic composition comprising a pre-fusion SARS CoV-2 S protein, or a fragment thereof, a nucleic acid molecule encoding said SARS CoV-2 S protein, and/or a vector comprising said nucleic acid molecule, as described herein.

[0017] The invention also relates to the use of the SARS CoV-2 S proteins or fragments thereof, as described herein, for isolating monoclonal antibodies against a SARS CoV-2 S protein from infected humans.

[0018] Also provided is the use of the pre-fusion SARS CoV-2 S proteins of the invention in methods of screening for candidate SARS CoV-2 antiviral agents, including but not limited to antibodies against SARS CoV-2.

### BRIEF DESCRIPTION OF THE DRAWINGS

[0019] The foregoing summary, as well as the following detailed description of the invention, will be better understood when read in conjunction with the appended drawings. It should be understood that the invention is not limited to the precise embodiments shown in the drawings.

[0020] FIG. 1: Schematic representation of the conserved elements of the fusion domain of a SARS CoV-2 S protein. The head domain contains an N-terminal (NTD) domain, the receptor binding domain (RBD) and domains SD1 and SD2. The fusion domain contains the fusion peptide (FP), refolding region 1 (RR1), refolding region 2 (RR2), transmembrane region (TM) and cytoplasmic tail. Cleavage site between S1 and S2 and the S2′ cleavage sites are indicated with arrow

[0021] FIG. 2: Analytical SEC samples of semi-stable SARS-CoV-2 S trimer proteins after freeze thaw cycles. S trimer protein according to SEQ ID NO: 3 (A) and the same protein in which the tag was replaced by a C-tag (B) after flash freezing in liquid Nitrogen and thawing 1 time (dark solid line) and 5 times (light solid line), compared with unfrozen S protein (dashed line). The peak at 5 minutes corresponds to the S trimer.

[0022] FIG. 3: Percentage of S trimer expression for S proteins with indicated mutations as measured by ACE2-Fc binding in AlphaLISA assay compared with control unstable uncleaved SARS-CoV-2 S (with furin site mutation) (SEQ ID NO: 2). The recombinant S proteins tested contain point mutations or a disulfide bridge, as indicated in the figure, introduced into the backbone of unstable uncleaved SARS-CoV2 S ectodomain (SEQ ID NO: 2)(Furin KO). Analysis was performed on crude cell culture supernatants.

[0023] FIG. 4: Analytical SEC profile showing trimer peaks of unstable uncleaved SARS-CoV-2 S (SEQ ID NO: 2) (dashed lines), compared to variants with indicated point mutations or disulfide bridge (solid lines). Analysis was performed on crude cell culture supernatants. )

### DETAILED DESCRIPTION OF THE INVENTION

[0024] As explained above, the spike protein (S) of SARS-CoV-2 and of other Corona viruses is involved in fusion of the viral membrane with a host cell membrane, which is required for infection. SARS-CoV-2 S RNA is translated into a 1273 amino acid precursor protein, which contains a signal peptide sequence at the N-terminus (e.g. amino acid residues 1-13 of SEQ ID NO: 1) which is removed by a signal peptidase in the endoplasmic reticulum. Priming of the S protein typically involves cleavage by host proteases at the boundary between the S1 and S2 subunits (S1/S2) in a subset of coronaviruses (including SARS CoV-2), and at a conserved site upstream of the fusion peptide (S2′) in all known corona viruses. For SARS-CoV-2, furin cleaves at S1/S2 between residues 685 and 686 and subsequently within S2 at the S2′ site between residues at position 815 and 816 by TMPRSS2. C-terminal to the S2′ site the proposed fusion peptide is located at the N-terminus of the refolding region 1 (FIG. 1).

[0025] A vaccine against SARS-CoV-2 infection is currently not yet available. Several vaccine modalities are possible, such as genetically based or vector-based vaccines or e.g. subunit vaccines based on purified S protein. Since class I proteins are metastable proteins, increasing the stability of the pre-fusion conformation of fusion proteins increases the expression level of the protein because less protein will be misfolded and more protein will successfully transport through the secretory pathway. Therefore, if the stability of the pre-fusion conformation of the class I fusion protein, like SARS CoV-2 S protein is increased, the immunogenic properties of a vector-based vaccine will be improved since the expression of the S protein is higher and the conformation of the immunogen resembles the pre-fusion conformation that is recognized by potent neutralizing and protective antibodies. For subunit-based vaccines, stabilizing the pre-fusion S conformation is even more important. Besides the importance of high expression, which is needed to manufacture a vaccine successfully, maintenance of the pre-fusion conformation during the manufacturing process and during storage over time is critical for protein-based vaccines. In addition, for a soluble, subunit-based vaccine, the SARS CoV-2 S protein needs to be truncated by deletion of the transmembrane (TM) and the cytoplasmic region to create a soluble secreted S protein (sS). Because the TM region is responsible for membrane anchoring and increases stability, the anchorless soluble S protein is considerably more labile than the full-length protein and will even more readily refold into the post-fusion end-state. In order to obtain soluble S protein in the stable pre-fusion conformation that shows high expression levels and high stability, the pre-fusion conformation thus needs to be stabilized. Because also the full length (membrane-bound) SARS CoV-2 S protein is metastable, the stabilization of the pre-fusion conformation is also desirable for the full-length SARS CoV-2 S protein, i.e. including the TM and cytoplasmic region, e.g. for any DNA, RNA, live attenuated or vector-based vaccine approach.

[0026] The present invention thus provides stabilized, recombinant pre-fusion SARS CoV-2 S proteins, comprising an S1 and an S2 domain, and comprising at least one mutation selected from the group consisting of a mutation of at least one amino acid in the loop region corresponding to amino acid residues 941 - 945 into G, and a disulfide bridge between residues 970 and 999, wherein the numbering of the amino acid positions is according to the numbering of the amino acid positions in SEQ ID NO: 1, and fragments thereof. According to the invention it has been demonstrated that the presence of a G in the loop region and/or a disulfide bridge at the indicated positions increases the stability of the proteins in the pre-fusion conformation. According to the invention, the glycine (G) or disulfide bridges are introduced by substitution (mutation) of the amino acid at that position into a specific amino acid according to the invention. According to the invention, the proteins thus comprise one or more mutations in their amino acid sequence, i.e. the naturally occurring amino acid at these positions has been substituted with another amino acid.

[0027] The proteins may comprise a mutation of at least one amino acid in the loop region corresponding to amino acid residues 941 - 945 G, in combination with a disulfide bridge between residues 970 and 999.

[0028] According to the invention it is to be understood that “a disulfide bridge between residues 970 and 999” means that the amino acids at the positions 970 and 999 have been mutated into C.

[0029] In certain embodiments, the at least one mutation in the loop region corresponding to amino acid residues 941 - 945 is a mutation of the amino acid at position 941 into G.

[0030] Alternatively, or in addition, the at least one mutation in the loop region corresponding to amino acid residues 941 - 945 is a mutation of the amino acid at position 943 into G.

[0031] Alternatively, or in addition, the at least one mutation in the loop region corresponding to amino acid residues 941 - 945 is a mutation of the amino acid at position 944 into G.

[0032] According to the invention, thus one or more amino acids in the loop region may be mutated into G.

[0033] The proteins of the present invention may further comprise one or more additional mutations selected from the group consisting of: a mutation of at least one amino acid in the loop region corresponding to amino acid residues 941 - 945 into P, a mutation of the amino acid at position 892, a mutation of the amino acid at position 614, a mutation at position 572, a mutation at position 532, a disulfide bridge between residues 880 and 888, and a disulfide bridge between residues 884 and 893, wherein the numbering of the amino acid positions is again according to the numbering of the amino acid positions in SEQ ID NO: 1.

[0034] According to the invention, it has to be understood that the additional mutation of at least one amino acid in the loop region corresponding to amino acid residues 941 - 945 into P means the mutation of at least one amino acid in said loop region that has not been mutated into G.

[0035] In certain embodiments, the at least one mutation in the loop region corresponding to amino acid residues 941 - 945 is a mutation of the amino acid at position 942 into P.

[0036] Alternatively, or in addition, the at least one mutation in the loop region corresponding to amino acid residues 941 - 945 is a mutation of the amino acid at position 941 into P.

[0037] Alternatively, or in addition, the at least one mutation in the loop region corresponding to amino acid residues 941 - 945 is a mutation of the amino acid at position 944 into P.

[0038] Alternatively, or in addition, the mutation at position 892 is a mutation into P.

[0039] Alternatively, or in addition, the mutation at position 614 is a mutation into N or G.

[0040] Alternatively, or in addition, the mutation at position 532 is a mutation into P.

[0041] Alternatively, or in addition, the mutation at position 572 is a mutation into I.

[0042] In certain embodiments, the proteins do not comprise both the disulfide bridge between residues 880 and 888 and the disulfide bridge between residues 884 and 893.

[0043] In certain embodiments, the SARS CoV-2 S proteins further comprise a deletion of the furin cleavage site. A deletion of the furin cleavage, e.g. by mutation of one or more amino acids in the furin cleavage site (such that the protein is not cleaved by furin), renders the protein uncleaved, which further increases its stability. Deleting the furin cleavage site can be achieved in any suitable way that is known to the skilled person. In certain embodiments, the deletion of the furin cleavage site comprises a mutation of the amino acid at position 682 into S and/or a mutation of the amino acid at position 685 into G.

[0044] In certain embodiments, the proteins further comprise a mutation of the amino acids at position 986 and 987 into proline.

[0045] In certain embodiments, the SARS CoV-2 S proteins of the invention comprise at least two mutations.

[0046] In certain embodiments, the SARS CoV-2 S proteins of the invention comprise at least three mutations.

[0047] In certain embodiments, the SARS CoV-2 S proteins of the invention comprise at least four mutations.

[0048] In certain embodiments, the SARS CoV-2 S proteins of the invention comprise at least five mutations.

[0049] In certain embodiments, the SARS CoV-2 S proteins of the invention comprise at least six mutations.

[0050] An amino acid according to the invention can be any of the twenty naturally occurring (or ‘standard’ amino acids) or variants thereof, such as e.g. D-amino acids (the D-enantiomers of amino acids with a chiral center), or any variants that are not naturally found in proteins, such as e.g. norleucine. The standard amino acids can be divided into several groups based on their properties. Important factors are charge, hydrophilicity or hydrophobicity, size and functional groups. These properties are important for protein structure and protein-protein interactions. Some amino acids have special properties such as cysteine, that can form covalent disulfide bonds (or disulfide bridges) to other cysteine residues, proline that induces turns of the polypeptide backbone, and glycine that is more flexible than other amino acids. Table 1 shows the abbreviations and properties of the standard amino acids.

[0051] It will be appreciated by a skilled person that the mutations can be made to the protein by routine molecular biology procedures.

[0052] In certain embodiments, the present invention provides recombinant SARS-CoV-2 S proteins, and fragments thereof, wherein the amino acid at position 941 is G, the amino acid at position 943 is G, and/or the amino acid at position 944 is G, and/or which comprise a disulfide bridge between residues 970 and 999, wherein the numbering of the amino acid positions is according to the numbering of the amino acid positions in SEQ ID NO: 1.

[0053] In certain embodiments, the SARS CoV-2 S proteins further comprise a deletion of the furin cleavage site. A deletion of the furin cleavage, e.g. by mutation of one or more amino acids in the furin cleavage site (such that the protein is not cleaved by furin), renders the protein uncleaved, which further increases its stability. Deleting the furin cleavage site can be achieved in any suitable way that is known to the skilled person. In certain embodiments, the deletion of the furin cleavage site comprises a mutation of the amino acid at position 682 into S and/or a mutation of the amino acid at position 685 into G.

[0054] In certain embodiments, the proteins further comprise a mutation of the amino acids at position 986 and 987 into proline.

[0055] In certain embodiments, the invention provides SARS-CoV 2 proteins comprising an amino acid sequence selected from the group consisting of SEQ ID NO: 8-119, or fragments thereof.

[0056] In a preferred embodiment, the proteins comprise a deletion of the furin cleavage site, a mutation of the amino acid at position 614 into N or G, a mutation of the amino acid at position 892 into P, a mutation of the amino acid at position 942 into P, a mutation of the amino acid at position 943 into G and a mutation of the amino acid at position 987 into P. When these mutations are introduced in the amino acid sequence of the SARS CoV-2 S ectodomain, stable soluble trimeric SARS CoV-2 S proteins are obtained without the need to add a heterologous trimerization domain.

[0057] The term “fragment” as used herein refers to a peptide that has an amino-terminal and/or carboxy-terminal and/or internal deletion, but where the remaining amino acid sequence is identical to the corresponding positions in the sequence of a SARS CoV-2 S protein, for example, the full-length sequence of a SARS CoV-2 S protein. It will be appreciated that for inducing an immune response and in general for vaccination purposes, a protein needs not to be full length nor have all its wild type functions, and fragments of the protein are equally useful. A fragment according to the invention is an immunologically active fragment, and typically comprises at least 15 amino acids, or at least 30 amino acids, of the SARS CoV-2 S protein. In certain embodiments, it comprises at least 50, 75, 100, 150, 200, 250, 300, 350, 400, 450, 500, or 550 amino acids, of the SARS CoV-2 S protein. In certain embodiment, the fragment is the SARS CoV2 ectodomain.

[0058] In certain embodiments, the proteins according to the invention are soluble proteins, e.g. S protein ectodomains, and comprise a truncated S2 domain. As used herein a “truncated” S2 domain refers to a S2 domain that is not a full length S2 domain, i.e. wherein either N-terminally or C-terminally one or more amino acid residues have been deleted. According to the invention, at least the transmembrane domain and cytoplasmic domain are deleted to permit expression as a soluble ectodomain (corresponding to the amino acids 1-1208 of SEQ ID NO: 1). For the stabilization of such soluble SARS CoV-2 S protein in the pre-fusion conformation, a heterologous trimerization domain, such as a fibritin - based trimerization domain, may be fused to the C-terminus of the Corona virus S protein ectodomain. This fibritin domain or ‘Foldon’ is derived from T4 fibritin and was described earlier as an artificial natural trimerization domain (Letarov et al., (1993); S-Guthe et al., (2004)). Thus, in certain embodiments, the transmembrane region has been replaced by a heterologous trimerization domain. In a preferred embodiment, the heterologous trimerization domain is a foldon domain comprising the amino acid sequence of SEQ ID NO:4. However, it is to be understood that according to the invention other trimerization domains are also possible. It is also possible that the proteins do not comprise a heterologous trimerization domain.

[0059] Thus, in certain preferred embodiments, the soluble SARS CoV-2 S proteins do not comprise a heterologous trimerization domain.

[0060] The pre-fusion SARS CoV-2 S proteins according to the invention are trimeric and stable, i.e. do not readily change into the post-fusion conformation upon processing of the proteins, such as e.g. upon purification, freeze-thaw cycles, and/or storage etc. In certain embodiments, the pre-fusion SARS CoV-2 S proteins have an increased stability as compared to SARS CoV-2 S proteins without the mutations of the invention, e.g. as indicated by an increased melting temperature (measured by e.g. differential scanning fluorimetry).

[0061] The proteins according to the invention may comprise a signal peptide, also referred to as signal sequence or leader peptide, corresponding to amino acids 1-13 of SEQ ID NO: 1. Signal peptides are short (typically 5-30 amino acids long) peptides present at the N-terminus of the majority of newly synthesized proteins that are destined towards the secretory pathway.

[0062] In certain embodiments, the proteins according to the invention do not comprise a signal peptide.

[0063] In certain embodiments, the proteins comprise a tag sequence, such as a HIS-Tag or C-Tag. A His-Tag (or polyhistidine-tag) is an amino acid motif in proteins that consists of at least five histidine (H) residues, preferably placed at the N- or C-terminus of the protein, which is generally used for purification purposes. In certain embodiments, the proteins according to the invention do not comprise a tag sequence. Alternatively, other tags like a C-tag can be used for these purposes.

[0064] The invention also provides methods for stabilizing a SARS CoV-2 S protein, said method comprising introducing in the amino acid sequence of a SARS CoV-2 S protein at least one mutation selected from the group consisting of a mutation of at least one amino acid in the loop region corresponding to amino acid residues 941 - 945 into G, and a disulfide bridge between residues 970 and 999, wherein the numbering of the amino acid positions is according to the numbering of the amino acid positions in SEQ ID NO: 1.

[0065] In certain embodiments, the at least one mutation in the loop region corresponding to amino acid residues 941 - 945 is a mutation of the amino acid at position 941 into G.

[0066] Alternatively, or in addition, the at least one mutation in the loop region corresponding to amino acid residues 941 - 945 is a mutation of the amino acid at position 943 into G.

[0067] Alternatively, or in addition, the at least one mutation in the loop region corresponding to amino acid residues 941 - 945 is a mutation of the amino acid at position 944 into G.

[0068] In certain embodiments, the methods further comprise deleting the furin cleavage site. Deleting the furin cleavage site may be achieved in any way known in the art.

[0069] In certain embodiments, the deletion of the furin cleavage site comprises introducing a mutation of the amino acid at position 682 into S and/or a mutation of the amino acid at position 685 into G.

[0070] In certain embodiments, the methods further comprise introducing a mutation of the amino acids at position 986 and 987 into proline.

[0071] The present invention further provides nucleic acid molecules encoding the SARS CoV-2 S proteins according to the invention. The term “nucleic acid molecule” as used in the present invention refers to a polymeric form of nucleotides (i.e. polynucleotides) and includes both DNA (e.g. cDNA, genomic DNA) and RNA, and synthetic forms and mixed polymers of the above.

[0072] In preferred embodiments, the nucleic acid molecules encoding the proteins according to the invention are codon-optimized for expression in mammalian cells, preferably human cells, or insect cells. Methods of codon-optimization are known and have been described previously (e.g. WO 96/09378 for mammalian cells). A sequence is considered codon-optimized if at least one non-preferred codon as compared to a wild type sequence is replaced by a codon that is more preferred. Herein, a non-preferred codon is a codon that is used less frequently in an organism than another codon coding for the same amino acid, and a codon that is more preferred is a codon that is used more frequently in an organism than a non-preferred codon. The frequency of codon usage for a specific organism can be found in codon frequency tables, such as in http://www.kazusa.or.jp/codon. Preferably more than one non-preferred codon, preferably most or all non-preferred codons, are replaced by codons that are more preferred. Preferably the most frequently used codons in an organism are used in a codon-optimized sequence. Replacement by preferred codons generally leads to higher expression.

[0073] It will be understood by a skilled person that numerous different polynucleotides and nucleic acid molecules can encode the same protein as a result of the degeneracy of the genetic code. It is also understood that skilled persons may, using routine techniques, make nucleotide substitutions that do not affect the protein sequence encoded by the nucleic acid molecules to reflect the codon usage of any particular host organism in which the proteins are to be expressed. Therefore, unless otherwise specified, a “nucleotide sequence encoding an amino acid sequence” includes all nucleotide sequences that are degenerate versions of each other and that encode the same amino acid sequence. Nucleotide sequences that encode proteins and RNA may or may not include introns.

[0074] Nucleic acid sequences can be cloned using routine molecular biology techniques, or generated de novo by DNA synthesis, which can be performed using routine procedures by service companies having business in the field of DNA synthesis and/or molecular cloning (e.g. GeneArt, GenScript, Invitrogen, Eurofins).

[0075] The invention also provides vectors comprising a nucleic acid molecule as described above. In certain embodiments, a nucleic acid molecule according to the invention thus is part of a vector. Such vectors can easily be manipulated by methods well known to the person skilled in the art and can for instance be designed for being capable of replication in prokaryotic and/or eukaryotic cells. In addition, many vectors can be used for transformation of eukaryotic cells and will integrate in whole or in part into the genome of such cells, resulting in stable host cells comprising the desired nucleic acid in their genome. The vector used can be any vector that is suitable for cloning DNA and that can be used for transcription of a nucleic acid of interest.

[0076] In certain embodiments of the invention, the vector is an adenovirus vector. An adenovirus according to the invention belongs to the family of the Adenoviridae, and preferably is one that belongs to the genus Mastadenovirus. It can be a human adenovirus, but also an adenovirus that infects other species, including but not limited to a bovine adenovirus (e.g. bovine adenovirus 3, BAdV3), a canine adenovirus (e.g. CAdV2), a porcine adenovirus (e.g. PAdV3 or 5), or a simian adenovirus (which includes a monkey adenovirus and an ape adenovirus, such as a chimpanzee adenovirus or a gorilla adenovirus). Preferably, the adenovirus is a human adenovirus (HAdV, or AdHu), or a simian adenovirus such as chimpanzee or gorilla adenovirus (ChAd, AdCh, or SAdV), or a rhesus monkey adenovirus (RhAd). In the invention, a human adenovirus is meant if referred to as Ad without indication of species, e.g. the brief notation “Ad26” means the same as HAdV26, which is human adenovirus serotype 26. Also as used herein, the notation “rAd” means recombinant adenovirus, e.g., “rAd26” refers to recombinant human adenovirus 26.

[0077] Most advanced studies have been performed using human adenoviruses, and human adenoviruses are preferred according to certain aspects of the invention. In certain preferred embodiments, a recombinant adenovirus according to the invention is based upon a human adenovirus. In preferred embodiments, the recombinant adenovirus is based upon a human adenovirus serotype 5, 11, 26, 34, 35, 48, 49, 50, 52, etc. According to a particularly preferred embodiment of the invention, an adenovirus is a human adenovirus of serotype 26.

[0078] Advantages of these serotypes include a low seroprevalence and/or low pre-existing neutralizing antibody titers in the human population, and experience with use in human subjects in clinical trials.

[0079] Simian adenoviruses generally also have a low seroprevalence and/or low pre-existing neutralizing antibody titers in the human population, and a significant amount of work has been reported using chimpanzee adenovirus vectors (e.g. US6083716; WO 2005/071093; WO 2010/086189; WO 2010085984; Farina et al, 2001, J Virol 75: 11603-13; Cohen et al, 2002, J Gen Virol 83: 151-55; Kobinger et al, 2006, Virology 346: 394-401; Tatsis et al., 2007, Molecular Therapy 15: 608-17; see also review by Bangari and Mittal, 2006, Vaccine 24: 849-62; and review by Lasaro and Ertl, 2009, Mol Ther 17: 1333-39). Hence, in other embodiments, the recombinant adenovirus according to the invention is based upon a simian adenovirus, e.g. a chimpanzee adenovirus. In certain embodiments, the recombinant adenovirus is based upon simian adenovirus type 1, 7, 8, 21, 22, 23, 24, 25, 26, 27.1, 28.1, 29, 30, 31.1, 32, 33, 34, 35.1, 36, 37.2, 39, 40.1, 41.1, 42.1, 43, 44, 45, 46, 48, 49, 50 or SA7P. In certain embodiments, the recombinant adenovirus is based upon a chimpanzee adenovirus such as ChAdOx 1 (see e.g. WO 2012/172277), or ChAdOx 2 (see e.g. WO 2018/215766). In certain embodiments, the recombinant adenovirus is based upon a chimpanzee adenovirus such as BZ28 (see e.g. WO 2019/086466). In certain embodiments, the recombinant adenovirus is based upon a gorilla adenovirus such as BLY6 (see e.g. WO 2019/086456), or BZ1 (see e.g. WO 2019/086466).

[0080] Preferably, the adenovirus vector is a replication deficient recombinant viral vector, such as rAd26, rAd35, rAd48, rAd5HVR48, etc.

[0081] In a preferred embodiment of the invention, the adenoviral vectors comprise capsid proteins from rare serotypes, e.g. including Ad26. In the typical embodiment, the vector is an rAd26 virus. An “adenovirus capsid protein” refers to a protein on the capsid of an adenovirus (e.g., Ad26, Ad35, rAd48, rAd5HVR48 vectors) that is involved in determining the serotype and/or tropism of a particular adenovirus. Adenoviral capsid proteins typically include the fiber, penton and/or hexon proteins. As used herein a “capsid protein” for a particular adenovirus, such as an “Ad26 capsid protein” can be, for example, a chimeric capsid protein that includes at least a part of an Ad26 capsid protein. In certain embodiments, the capsid protein is an entire capsid protein of Ad26. In certain embodiments, the hexon, penton and fiber are of Ad26.

[0082] One of ordinary skill in the art will recognize that elements derived from multiple serotypes can be combined in a single recombinant adenovirus vector. Thus, a chimeric adenovirus that combines desirable properties from different serotypes can be produced. Thus, in some embodiments, a chimeric adenovirus of the invention could combine the absence of pre-existing immunity of a first serotype with characteristics such as temperature stability, assembly, anchoring, production yield, redirected or improved infection, stability of the DNA in the target cell, and the like. See for example WO 2006/040330 for chimeric adenovirus Ad5HVR48, that includes an Ad5 backbone having partial capsids from Ad48, and also e.g. WO 2019/086461 for chimeric adenoviruses Ad26HVRPtr1, Ad26HVRPtr12, and Ad26HVRPtr13, that include an Ad26 virus backbone having partial capsid proteins of Ptr1, Ptr12, and Ptr13, respectively)

[0083] In certain embodiments the recombinant adenovirus vector useful in the invention is derived mainly or entirely from Ad26 (i.e., the vector is rAd26). In some embodiments, the adenovirus is replication deficient, e.g., because it contains a deletion in the E1 region of the genome. For adenoviruses being derived from non-group C adenovirus, such as Ad26 or Ad35, it is typical to exchange the E4-orf6 coding sequence of the adenovirus with the E4-orf6 of an adenovirus of human subgroup C such as Ad5. This allows propagation of such adenoviruses in well-known complementing cell lines that express the E1 genes of Ad5, such as for example 293 cells, PER.C6 cells, and the like (see, e.g. Havenga, et al., 2006, J Gen Virol 87: 2135-43; WO 03/104467). However, such adenoviruses will not be capable of replicating in non-complementing cells that do not express the E1 genes of Ad5.

[0084] The preparation of recombinant adenoviral vectors is well known in the art. Preparation of rAd26 vectors is described, for example, in WO 2007/104792 and in Abbink et al., (2007) Virol 81(9): 4654-63. Exemplary genome sequences of Ad26 are found in GenBank Accession EF 153474 and in SEQ ID NO: 1 of WO 2007/104792. Examples of vectors useful for the invention for instance include those described in WO2012/082918, the disclosure of which is incorporated herein by reference in its entirety.

[0085] Typically, a vector useful in the invention is produced using a nucleic acid comprising the entire recombinant adenoviral genome (e.g., a plasmid, cosmid, or baculovirus vector). Thus, the invention also provides isolated nucleic acid molecules that encode the adenoviral vectors of the invention. The nucleic acid molecules of the invention can be in the form of RNA or in the form of DNA obtained by cloning or produced synthetically. The DNA can be double-stranded or single-stranded.

[0086] The adenovirus vectors useful in the invention are typically replication deficient. In these embodiments, the virus is rendered replication deficient by deletion or inactivation of regions critical to replication of the virus, such as the E1 region. The regions can be substantially deleted or inactivated by, for example, inserting a gene of interest, such as a gene encoding the SARS-CoV2 S protein (usually linked to a promoter) within the region. In some embodiments, the vectors of the invention can contain deletions in other regions, such as the E2, E3 or E4 regions, or insertions of heterologous genes linked to a promoter within one or more of these regions. For E2- and/or E4-mutated adenoviruses, generally E2- and/or E4-complementing cell lines are used to generate recombinant adenoviruses. Mutations in the E3 region of the adenovirus need not be complemented by the cell line, since E3 is not required for replication.

[0087] A packaging cell line is typically used to produce sufficient amounts of adenovirus vectors for use in the invention. A packaging cell is a cell that comprises those genes that have been deleted or inactivated in a replication deficient vector, thus allowing the virus to replicate in the cell. Suitable packaging cell lines for adenoviruses with a deletion in the E1 region include, for example, PER.C6, 911, 293, and E1 A549.

[0088] In a preferred embodiment of the invention, the vector is an adenovirus vector, and more preferably a rAd26 vector, most preferably a rAd26 vector with at least a deletion in the E1 region of the adenoviral genome, e.g. such as that described in Abbink, J Virol, 2007. 81(9): p. 4654-63, which is incorporated herein by reference. Typically, the nucleic acid sequence encoding the stabilized SARS-CoV2 S protein is cloned into the E1 and/or the E3 region of the adenoviral genome.

[0089] Host cells comprising the nucleic acid molecules encoding the pre-fusion SARS CoV-2 S proteins also form part of the invention. The pre-fusion SARS CoV-2 S proteins may be produced through recombinant DNA technology involving expression of the molecules in host cells, e.g. Chinese hamster ovary (CHO) cells, tumor cell lines, BHK cells, human cell lines such as HEK293 cells, PER.C6 cells, or yeast, fungi, insect cells, and the like, or transgenic animals or plants. In certain embodiments, the cells are from a multicellular organism, in certain embodiments they are of vertebrate or invertebrate origin. In certain embodiments, the cells are mammalian cells, such as human cells, or insect cells. In general, the production of a recombinant proteins, such the pre-fusion SARS CoV-2 S proteins of the invention, in a host cell comprises the introduction of a heterologous nucleic acid molecule encoding the protein in expressible format into the host cell, culturing the cells under conditions conducive to expression of the nucleic acid molecule and allowing expression of the protein in said cell. The nucleic acid molecule encoding a protein in expressible format may be in the form of an expression cassette, and usually requires sequences capable of bringing about expression of the nucleic acid, such as enhancer(s), promoter, polyadenylation signal, and the like. The person skilled in the art is aware that various promoters can be used to obtain expression of a gene in host cells. Promoters can be constitutive or regulated, and can be obtained from various sources, including viruses, prokaryotic, or eukaryotic sources, or artificially designed.

[0090] Cell culture media are available from various vendors, and a suitable medium can be routinely chosen for a host cell to express the protein of interest, here the pre-fusion SARS CoV-2 S proteins. The suitable medium may or may not contain serum.

[0091] A “heterologous nucleic acid molecule” (also referred to herein as ‘transgene’) is a nucleic acid molecule that is not naturally present in the host cell. It is introduced into for instance a vector by standard molecular biology techniques. A transgene is generally operably linked to expression control sequences. This can for instance be done by placing the nucleic acid encoding the transgene(s) under the control of a promoter. Further regulatory sequences may be added. Many promoters can be used for expression of a transgene(s), and are known to the skilled person, e.g. these may comprise viral, mammalian, synthetic promoters, and the like. A non-limiting example of a suitable promoter for obtaining expression in eukaryotic cells is a CMV-promoter (US 5,385,839), e.g. the CMV immediate early promoter, for instance comprising nt. -735 to +95 from the CMV immediate early gene enhancer/promoter. A polyadenylation signal, for example the bovine growth hormone polyA signal (US 5,122,458), may be present behind the transgene(s). Alternatively, several widely used expression vectors are available in the art and from commercial sources, e.g. the pcDNA and pEF vector series of Invitrogen, pMSCV and pTK-Hyg from BD Sciences, pCMV-Script from Stratagene, etc, which can be used to recombinantly express the protein of interest, or to obtain suitable promoters and/or transcription terminator sequences, polyA sequences, and the like.

[0092] The cell culture can be any type of cell culture, including adherent cell culture, e.g. cells attached to the surface of a culture vessel or to microcarriers, as well as suspension culture. Most large-scale suspension cultures are operated as batch or fed-batch processes because they are the most straightforward to operate and scale up. Nowadays, continuous processes based on perfusion principles are becoming more common and are also suitable. Suitable culture media are also well known to the skilled person and can generally be obtained from commercial sources in large quantities, or custom-made according to standard protocols. Culturing can be done for instance in dishes, roller bottles or in bioreactors, using batch, fed-batch, continuous systems and the like. Suitable conditions for culturing cells are known (see e.g. Tissue Culture, Academic Press, Kruse and Paterson, editors (1973), and R.I. Freshney, Culture of animal cells: A manual of basic technique, fourth edition (Wiley-Liss Inc., 2000, ISBN 0-471-34889-9)).

[0093] The invention further provides compositions comprising a pre-fusion SARS CoV-2 S protein and/or a nucleic acid molecule, and/or a vector, as described above. The invention also provides compositions comprising a nucleic acid molecule and/or a vector, encoding such pre-fusion SARS CoV-2 S protein. The invention further provides immunogenic compositions comprising a pre-fusion SARS CoV-2 S protein, and/or a nucleic acid molecule, and/or a vector, as described above. The invention also provides the use of a stabilized pre-fusion SARS CoV-2 S protein, a nucleic acid molecule, and/or a vector, according to the invention, for inducing an immune response against a SARS CoV-2 S protein in a subject. Further provided are methods for inducing an immune response against SARS CoV-2 S protein in a subject, comprising administering to the subject a pre-fusion SARS CoV-2 S protein, and/or a nucleic acid molecule, and/or a vector according to the invention. Also provided are pre-fusion SARS CoV-2 S proteins, nucleic acid molecules, and/or vectors, according to the invention for use in inducing an immune response against SARS CoV-2 S protein in a subject. Further provided is the use of the pre-fusion SARS CoV-2 S proteins, and/or nucleic acid molecules, and/or vectors according to the invention for the manufacture of a medicament for use in inducing an immune response against SARS CoV-2 S protein in a subject. In certain embodiments, the nucleic acid molecule is DNA and/or an RNA molecule.

[0094] The pre-fusion SARS CoV-2 S proteins, nucleic acid molecules, or vectors of the invention may be used for prevention (prophylaxis, including post-exposure prophylaxis) of SARS CoV-2 infections. In certain embodiments, the prevention may be targeted at patient groups that are susceptible for and/or at risk of SARS CoV-2 infection or have been diagnosed with a SARS CoV-2 infection. Such target groups include, but are not limited to e.g., the elderly (e.g. ≥ 50 years old, ≥ 60 years old, and preferably ≥ 65 years old), hospitalized patients and patients who have been treated with an antiviral compound but have shown an inadequate antiviral response. In certain embodiments, the target population comprises human subjects from 2 months of age.

[0095] The pre-fusion SARS CoV-2 S proteins, nucleic acid molecules and/or vectors according to the invention may be used e.g. in stand-alone treatment and/or prophylaxis of a disease or condition caused by SARS CoV-2, or in combination with other prophylactic and/or therapeutic treatments, such as (existing or future) vaccines, antiviral agents and/or monoclonal antibodies.

[0096] The invention further provides methods for preventing and/or treating SARS CoV-2 infection in a subject utilizing the pre-fusion SARS CoV-2 S proteins, nucleic acid molecules and/or vectors according to the invention. In a specific embodiment, a method for preventing and/or treating SARS CoV-2 infection in a subject comprises administering to a subject in need thereof an effective amount of a pre-fusion SARS CoV-2 S protein, nucleic acid molecule and/or a vector, as described above. A therapeutically effective amount refers to an amount of a protein, nucleic acid molecule or vector, that is effective for preventing, ameliorating and/or treating a disease or condition resulting from infection by SARS CoV-2. Prevention encompasses inhibiting or reducing the spread of SARS CoV-2 or inhibiting or reducing the onset, development or progression of one or more of the symptoms associated with infection by SARS CoV-2. Amelioration as used in herein may refer to the reduction of visible or perceptible disease symptoms, viremia, or any other measurable manifestation of SARS CoV-2 infection.

[0097] For administering to subjects, such as humans, the invention may employ pharmaceutical compositions comprising a pre-fusion SARS CoV-2 S protein, a nucleic acid molecule and/or a vector as described herein, and a pharmaceutically acceptable carrier or excipient. In the present context, the term “pharmaceutically acceptable” means that the carrier or excipient, at the dosages and concentrations employed, will not cause any unwanted or harmful effects in the subjects to which they are administered. Such pharmaceutically acceptable carriers and excipients are well known in the art (see Remington’s Pharmaceutical Sciences, 18th edition, A. R. Gennaro, Ed., Mack Publishing Company [1990]; Pharmaceutical Formulation Development of Peptides and Proteins, S. Frokjaer and L. Hovgaard, Eds., Taylor & Francis [2000]; and Handbook of Pharmaceutical Excipients, 3rd edition, A. Kibbe, Ed., Pharmaceutical Press [2000]). The CoV S proteins, or nucleic acid molecules, preferably are formulated and administered as a sterile solution although it may also be possible to utilize lyophilized preparations. Sterile solutions are prepared by sterile filtration or by other methods known per se in the art. The solutions are then lyophilized or filled into pharmaceutical dosage containers. The pH of the solution generally is in the range of pH 3.0 to 9.5, e.g. pH 5.0 to 7.5. The CoV S proteins typically are in a solution having a suitable pharmaceutically acceptable buffer, and the composition may also contain a salt. Optionally stabilizing agent may be present, such as albumin. In certain embodiments, detergent is added. In certain embodiments, the CoV S proteins may be formulated into an injectable preparation.

[0098] In certain embodiments, a composition according to the invention further comprises one or more adjuvants. Adjuvants are known in the art to further increase the immune response to an applied antigenic determinant. The terms “adjuvant” and “immune stimulant” are used interchangeably herein and are defined as one or more substances that cause stimulation of the immune system. In this context, an adjuvant is used to enhance an immune response to the SARS CoV-2 S proteins of the invention. Examples of suitable adjuvants include aluminium salts such as aluminium hydroxide and/or aluminium phosphate; oil-emulsion compositions (or oil-in-water compositions), including squalene-water emulsions, such as MF59 (see e.g. WO 90/14837); saponin formulations, such as for example QS21 and Immunostimulating Complexes (ISCOMS) (see e.g. US 5,057,540; WO 90/03184, WO 96/11711, WO 2004/004762, WO 2005/002620); bacterial or microbial derivatives, examples of which are monophosphoryl lipid A (MPL), 3-O-deacylated MPL (3dMPL), CpG-motif containing oligonucleotides, ADP-ribosylating bacterial toxins or mutants thereof, such as E. coli heat labile enterotoxin LT, cholera toxin CT, and the like; eukaryotic proteins (e.g. antibodies or fragments thereof (e.g. directed against the antigen itself or CD1a, CD3, CD7, CD80) and ligands to receptors (e.g. CD40L, GMCSF, GCSF, etc), which stimulate immune response upon interaction with recipient cells. In certain embodiments the compositions of the invention comprise aluminium as an adjuvant, e.g. in the form of aluminium hydroxide, aluminium phosphate, aluminium potassium phosphate, or combinations thereof, in concentrations of 0.05 - 5 mg, e.g. from 0.075-1.0 mg, of aluminium content per dose.

[0099] The pre-fusion SARS CoV-2 S proteins may also be administered in combination with or conjugated to nanoparticles, such as e.g. polymers, liposomes, virosomes, virus-like particles. The SARS CoV-2 S proteins may be combined with or encapsidated in or conjugated to the nanoparticles with or without adjuvant. Encapsulation within liposomes is described, e.g. in US 4,235,877. Conjugation to macromolecules is disclosed, for example in US 4,372,945 or US 4,474,757.

[0100] In other embodiments, the compositions do not comprise adjuvants. In certain embodiments, the invention provides methods for making a vaccine against a SARS CoV-2 virus, comprising providing a composition according to the invention and formulating it into a pharmaceutically acceptable composition. The term “vaccine” refers to an agent or composition containing an active component effective to induce a certain degree of immunity in a subject against a certain pathogen or disease, which will result in at least a decrease (up to complete absence) of the severity, duration or other manifestation of symptoms associated with infection by the pathogen or the disease. In the present invention, the vaccine comprises an effective amount of a pre-fusion SARS CoV-2 S protein and/or a nucleic acid molecule encoding a pre-fusion SARS CoV-2 S protein, and/or a vector comprising said nucleic acid molecule, which results in an immune response against the S protein of SARS CoV-2 . This provides a method of preventing serious lower respiratory tract disease leading to hospitalization and the decrease in frequency of complications such as pneumonia and bronchiolitis due to SARS CoV-2 infection and replication in a subject. The term “vaccine” according to the invention implies that it is a pharmaceutical composition, and thus typically includes a pharmaceutically acceptable diluent, carrier or excipient. It may or may not comprise further active ingredients. In certain embodiments it may be a combination vaccine that further comprises additional components that induce an immune response against SARS CoV-2, e.g. against other antigenic proteins of SARS CoV-2, or may comprise different forms of the same antigenic component. A combination product may also comprise immunogenic components against other infectious agents, e.g. other respiratory viruses including but not limited to influenza virus or RSV. The administration of the additional active components may for instance be done by separate, e.g. concurrent administration, or in a prime-boost setting, or by administering combination products of the vaccines of the invention and the additional active components.

[0101] Compositions may be administered to a subject, e.g. a human subject. The total dose of the SARS CoV-2 S proteins in a composition for a single administration can for instance be about 0.01 µg to about 10 mg, e.g. 1 µg - 1 mg, e.g. 10 µg - 100 µg. Determining the recommended dose will be carried out by experimentation and is routine for those skilled in the art.

[0102] Administration of the compositions according to the invention can be performed using standard routes of administration. Non-limiting embodiments include parenteral administration, such as intradermal, intramuscular, subcutaneous, transcutaneous, or mucosal administration, e.g. intranasal, oral, and the like. In one embodiment a composition is administered by intramuscular injection. The skilled person knows the various possibilities to administer a composition, e.g. a vaccine in order to induce an immune response to the antigen(s) in the vaccine.

[0103] A subject as used herein preferably is a mammal, for instance a rodent, e.g. a mouse, a cotton rat, or a non-human-primate, or a human. Preferably, the subject is a human subject.

[0104] The proteins, nucleic acid molecules, vectors, and/or compositions may also be administered, either as prime, or as boost, in a homologous or heterologous prime-boost regimen. If a boosting vaccination is performed, typically, such a boosting vaccination will be administered to the same subject at a time between one week and one year, preferably between two weeks and four months, after administering the composition to the subject for the first time (which is in such cases referred to as ‘priming vaccination’). In certain embodiments, the administration comprises at least one prime and at least one booster administration.

[0105] The SARS CoV-2 S proteins may also be used to isolate monoclonal antibodies from a biological sample, e.g. a biological sample (such as blood, plasma, or cells) obtained from an immunized animal or infected human. The invention thus also relates to the use of the SARS CoV-2 protein as bait for isolating monoclonal antibodies.

[0106] Also provided is the use of the pre-fusion SARS CoV-2 S proteins of the invention in methods of screening for candidate SARS CoV-2 antiviral agents, including but not limited to antibodies against SARS CoV-2

[0107] In addition, the proteins of the invention may be used as diagnostic tool, for example to test the immune status of an individual by establishing whether there are antibodies in the serum of such individual capable of binding to the protein of the invention. The invention thus also relates to an in vitro diagnostic method for detecting the presence of an ongoing or past CoV infection in a subject said method comprising the steps of a) contacting a biological sample obtained from said subject with a protein according to the invention; and b) detecting the presence of antibody-protein complexes.

### EXAMPLES

### EXAMPLE 1: Instability of Semi-stabilized SARS-CoV2 S Protein

[0108] A plasmid corresponding to the semi-stabilized SARS-CoV2 S protein described by (Wrapp et. al., Science 2020, FurinKO+PP according to SEQ ID NO: 3) was synthesized and codon-optimized at Gene Art (Life Technologies, Carlsbad, CA). A variant with a HIS tag and a variant with a C-tag were purified. The constructs were cloned into pCDNA2004 or generated by standard methods widely known within the field involving site-directed mutagenesis and PCR and sequenced. The expression platform used was the Expi293F cells. The cells were transiently transfected using ExpiFectamine (Life Technologies) according to the manufacturer’s instructions and cultured for 6 days at 37° C. and 10% CO₂. The culture supernatant was harvested and spun for 5 minutes at 300 g to remove cells and cellular debris. The spun supernatant was subsequently sterile filtered using a 0.22 um vacuum filter and stored at 4° C. until use.

[0109] SARS-CoV2 S trimers were purified using a two-step purification protocol including either CaptureSelect™ C-tag affinity column for C-tagged protein, or, for HIS-tagged protein, by cOmplete His-tag 5 mL (Roche). Both proteins were further purified by size-exclusion chromatography using a HiLoad Superdex 200 16/600column (GE Healthcare). The C-tagged and HIS tagged S trimer was unstable after repeated freeze / thaw cycles FIGS. 2 A, B ). The purified HIS-tagged S trimer and the C-tagged trimer showed decay after 1 and especially after 5 flash freezing cycles using liquid Nitrogen (FIGS. 2 A, B).

### EXAMPLE 2: Stabilizing Mutations Analyzed With AlphaLISA and Analytical SEC

[0110] In order to stabilize the labile pre-fusion conformation of SARS-CoV2 S protein, amino acid residues at position 941, 943 and/or 944 (numbering according to the SEQ ID NO: 1) were mutated into G and a disulfide bridge was introduced between residues 970 and 999. Plasmids coding for the recombinant SARS-CoV-2 S protein ectodomains which were C-terminally fused to a foldon (SEQ ID NO: 4) were expressed in Expi293Fcells, and 3 days after transfection the supernatants were tested for binding to ACE2-Fc using AlphaLISA (FIG. 3).

[0111] For the AlphaLISA assay, SARS-CoV2 S variants in the pcDNA2004 vector containing a linker followed by a sortase A tag followed by a Flag- tag followed by a flexible (G₄S)₇ linker and ending with a His-tag, were prepared (the sequence of the tag, which was placed at the C-terminus of the S protein, is provided in SEQ ID NO: 2). Three days after transfection, crude supernatants were diluted 300 times in AlphaLISA buffer (PBS + 0.05% Tween-20 + 0.5 mg/mL BSA). Then, 10 µL of each dilution were transferred to a 96-well plate and mixed with 40 µL acceptor beads, donor beads and ACE2-Fc. The donor beads were conjugated to ProtA (Cat#: AS102M, Perkin Elmer), which binds to ACE2Fc. The acceptor beads were conjugated to an anti-His antibody (Cat#: AL128M, Perkin Elmer), which binds to the His-tag of the construct.

[0112] The mixture of the supernatant containing the expressed S protein, the ACE-2-Fc, donor beads, and acceptor beads was incubated at room temperature for 2 hours without shaking. Subsequently, the chemiluminescent signal was measured with an Ensight plate reader instrument (Perkin Elmer). The average background signal attributed to mock transfected cells was subtracted from the AlphaLISA counts measured for each of the SARS-CoV-2 S variants. Subsequently, the whole data set was divided by signal measured for the SARS CoV-2 S protein having the S backbone sequence signal to normalize the signal for each of the S variants tested to the backbone.

[0113] Compared with the soluble uncleaved S variant with a C-terminal foldon domain (SEQ ID NO: 2), the S variants with stabilizing amino acid substitutions at position 941, 943 and 944 or with a disulfide between residues 970 - 999 showed higher ACE2-Fc binding (FIG. 3).

[0114] The cell culture supernatants of transfections with a labile uncleaved SARS-CoV-2 S protein, and of variants with amino acid substitutions at position 941, 943 and/or 944 and with a disulfide between residues 970 - 999 were analyzed using analytical SEC (FIG. 4). An ultra high-performance liquid chromatography system (Vanquish, Thermo Scientific) and µDAWN TREOS instrument (Wyatt) coupled to an Optilab µT-rEX Refractive Index Detector (Wyatt), in combination with an in-line Nanostar DLS reader (Wyatt), was used for performing the analytical SEC experiment. The cleared crude cell culture supernatants were applied to a SRT-10C SEC-500 15 cm column, (Sepax Cat# 235500-4615) with the corresponding guard column (Sepax) equilibrated in running buffer (150 mM sodium phosphate, 50 mM NaCl, pH 7.0) at 0.35 mL/min. When analyzing supernatant samples, µMALS detectors were offline and analytical SEC data was analyzed using Chromeleon 7.2.8.0 software package. The signal of supernatants of non-transfected cells was subtracted from the signal of supernatants of S transfected cells. When purified proteins were analyzed using SEC-MALS, mMALS detectors were inline and data was analyzed using Astra 7.3 software package. For the protein component, a dn/dc (mL/g) value of 0.1850 was used and for the glycan component a value of 0.1410. Compared with the soluble uncleaved S variant with a C-terminal foldon domain, variants with amino acid substitutions T941G, S943G, A944G and a disulfide between residues 970 - 999 showed higher trimer content according to analytical SEC of culture supernatant.

TABLE 1

Standard amino acids, abbreviations and properties

| | | | | |
|---|---|---|---|---|
| Amino Acid | 3-Letter | 1-Letter | Side chain polarity | Side chain charge (pH 7.4) |
| alanine | Ala | A | non-polar | Neutral |
| arginine | Arg | R | Polar | Positive |
| asparagine | Asn | N | Polar | Neutral |
| aspartic acid | Asp | D | polar | Negative |
| cysteine | Cys | C | non-polar | Neutral |
| glutamic acid | Glu | E | polar | Negative |
| glutamine | Gln | Q | polar | Neutral |
| glycine | Gly | G | non-polar | Neutral |
| histidine | His | H | polar | positive(10%) neutral(90%) |
| isoleucine | Ile | I | non-polar | Neutral |
| leucine | Leu | L | non-polar | Neutral |
| lysine | Lys | K | polar | Positive |
| methionine | Met | M | non-polar | Neutral |
| phenylalanine | Phe | F | non-polar | Neutral |
| proline | Pro | P | non-polar | Neutral |
| serine | Ser | S | polar | Neutral |
| threonine | Thr | T | polar | Neutral |
| tryptophan | Trp | W | non-polar | Neutral |
| tyrosine | Tyr | Y | polar | Neutral |
| valine | Val | V | non-polar | Neutral |

### REFERENCES

[0115] Belouzard et al. (2009), Proc Natl Acad Sci U S A 106:5871-6.

[0116] Bosch et al. (2008), J Virol 82:8887-90.

[0117] Follis et al. (2006) Virology 350:358-69.

[0118] Madu et al. (2009), J Virol 83:7411-21.

[0119] Walls et al. (2016), Nature 531:114-7.

[0120] Wrapp et. al. (2020) Science 367(6482): 1260-1263.

[0121] Hoffmann et al. (2020) BioRxiv: doi: https://doi.org/10.1101/2020.01.31.929042

[0122] Bestle et al (2020) BioRxiv doi: https://doi.org/10.1101/2020.04.15.042085

[0123] Hastie et al. (2017), Science 356, 923-928.

[0124] Krarup et al (2015), Nat Commun 6, 8143.

[0125] Pallesen et al. (2017), Proc Natl Acad Sci USA 114, E7348-E7357.

[0126] Rutten et al. (2020), Cell Rep. 30(13):4540-4550.

[0127] Letarov et al. (1993), Biochemistry Moscow 64: 817-823.

[0128] S-Guthe et al. (2004), J. Mol. Biol. 337: 905-915

### Sequences

[0129] SEQ ID NO 1: full length S protein (underline signal peptide, double underline TM and cytoplasmic domain that is deleted in the soluble version)

MFVFLVLLPLVSSQCVNLTTRTQLPPAYTNSFTRGVYYPDKVFRSSVLHS
TQDLFLPFFSNVTWFHAIHVSGTNGTKRFDNPVLPFNDGVYFASTEKSNI
IRGWIFGTTLDSKTQSLLIVNNATNVVIKVCEFQFCNDPFLGVYYHKNNK
SWMESEFRVYSSANNCTFEYVSQPFLMDLEGKQGNFKNLREFVFKNIDGY
FKIYSKHTPINLVRDLPQGFSALEPLVDLPIGINITRFQTLLALHRSYLT
PGDSSSGWTAGAAAYYVGYLQPRTFLLKYNENGTITDAVDCALDPLSETK
CTLKSFTVEKGIYQTSNFRVQPTESIVRFPNITNLCPFGEVFNATRFASV
YAWNRKRISNCVADYSVLYNSASFSTFKCYGVSPTKLNDLCFTNVYADSF
VIRGDEVRQIAPGQTGKIADYNYKLPDDFTGCVIAWNSNNLDSKVGGNYN
YLYRLFRKSNLKPFERDISTEIYQAGSTPCNGVEGFNCYFPLQSYGFQPT
NGVGYQPYRVVVLSFELLHAPATVCGPKKSTNLVKNKCVNFNFNGLTGTG
VLTESNKKFLPFQQFGRDIADTTDAVRDPQTLEILDITPCSFGGVSVITP
GTNTSNQVAVLYQDVNCTEVPVAIHADQLTPTWRVYSTGSNVFQTRAGCL
IGAEHVNNSYECDIPIGAGICASYQTQTNSPRRARSVASQSIIAYTMSLG
AENSVAYSNNSIAIPTNFTISVTTEILPVSMTKTSVDCTMYICGDSTECS
NLLLQYGSFCTQLNRALTGIAVEQDKNTQEVFAQVKQIYKTPPIKDFGGF
NFSQILPDPSKPSKRSFIEDLLFNKVTLADAGFIKQYGDCLGDIAARDLI
CAQKFNGLTVLPPLLTDEMIAQYTSALLAGTITSGWTFGAGAALQIPFAM
QMAYRFNGIGVTQNVLYENQKLIANQFNSAIGKIQDSLSSTASALGKLQD
VVNQNAQALNTLVKQLSSNFGAISSVLNDILSRLDKVEAEVQIDRLITGR
LQSLQTYVTQQLIRAAEIRASANLAATKMSECVLGQSKRVDFCGKGYHLM
SFPQSAPHGVVFLHVTYVPAQEKNFTTAPAICHDGKAHFPREGVFVSNGT
HWFVTQRNFYEPQIITTDNTFVSGNCDVVIGIVNNTVYDPLQPELDSFKE
ELDKYFKNHTSPDVDLGDISGINASVVNIQKEIDRLNEVAKNLNESLIDL
QELGKYEQYIKWPWYIWLGFIAGLIAIVMVTIMLCCMTSCCSCLKGCCSC GSCCKFDEDDSEPVLKGVKLHYT

[0130] SEQ ID NO 2: soluble S protein with furin KO, underline signal peptide, double underline linker, foldon, tags etc.)

MFVFLVLLPLVSSQCVNLTTRTQLPPAYTNSFTRGVYYPDKVFRSSVLHS
TQDLFLPFFSNVTWFHAIHVSGTNGTKRFDNPVLPFNDGVYFASTEKSNI
IRGWIFGTTLDSKTQSLLIVNNATNVVIKVCEFQFCNDPFLGVYYHKNNK
SWMESEFRVYSSANNCTFEYVSQPFLMDLEGKQGNFKNLREFVFKNIDGY
FKIYSKHTPINLVRDLPQGFSALEPLVDLPIGINITRFQTLLALHRSYLT
PGDSSSGWTAGAAAYYVGYLQPRTFLLKYNENGTITDAVDCALDPLSETK
CTLKSFTVEKGIYQTSNFRVQPTESIVRFPNITNLCPFGEVFNATRFASV
YAWNRKRISNCVADYSVLYNSASFSTFKCYGVSPTKLNDLCFTNVYADSF
VIRGDEVRQIAPGQTGKIADYNYKLPDDFTGCVIAWNSNNLDSKVGGNYN
YLYRLFRKSNLKPFERDISTEIYQAGSTPCNGVEGFNCYFPLQSYGFQPT
NGVGYQPYRVVVLSFELLHAPATVCGPKKSTNLVKNKCVNFNFNGLTGTG
VLTESNKKFLPFQQFGRDIADTTDAVRDPQTLEILDITPCSFGGVSVITP
GTNTSNQVAVLYQDVNCTEVPVAIHADQLTPTWRVYSTGSNVFQTRAGCL
IGAEHVNNSYECDIPIGAGICASYQTQTNSPSRAGSVASQSIIAYTMSLG
AENSVAYSNNSIAIPTNFTISVTTEILPVSMTKTSVDCTMYICGDSTECS
NLLLQYGSFCTQLNRALTGIAVEQDKNTQEVFAQVKQIYKTPPIKDFGGF
NFSQILPDPSKPSKRSFIEDLLFNKVTLADAGFIKQYGDCLGDIAARDLI
CAQKFNGLTVLPPLLTDEMIAQYTSALLAGTITSGWTFGAGAALQIPFAM
QMAYRFNGIGVTQNVLYENQKLIANQFNSAIGKIQDSLSSTASALGKLQD
VVNQNAQALNTLVKQLSSNFGAISSVLNDILSRLDKVEAEVQIDRLITGR
LQSLQTYVTQQLIRAAEIRASANLAATKMSECVLGQSKRVDFCGKGYHLM
SFPQSAPHGVVFLHVTYVPAQEKNFTTAPAICHDGKAHFPREGVFVSNGT
HWFVTQRNFYEPQIITTDNTFVSGNCDVVIGIVNNTVYDPLQPELDSFKE
ELDKYFKNHTSPDVDLGDISGINASVVNIQKEIDRLNEVAKNLNESLIDL
QELGKYEQGSGYIPEAPRDGQAYVRKDGEWVLLSTFLGRSLEVLFQGPGS LPETGGGSDYKDDDDKGGGGSGGGGSGGGGSGGGGSGGGGSHHHHHH

[0131] SEQ ID NO 3: soluble S protein with Furin KO and double proline in the hinge loop. (underline signal peptide) double underline linker, foldon, tags etc.)

MFVFLVLLPLVSSQCVNLTTRTQLPPAYTNSFTRGVYYPDKVFRSSVLHS
TQDLFLPFFSNVTWFHAIHVSGTNGTKRFDNPVLPFNDGVYFASTEKSNI
IRGWIFGTTLDSKTQSLLIVNNATNVVIKVCEFQFCNDPFLGVYYHKNNK
SWMESEFRVYSSANNCTFEYVSQPFLMDLEGKQGNFKNLREFVFKNIDGY
FKIYSKHTPINLVRDLPQGFSALEPLVDLPIGINITRFQTLLALHRSYLT
PGDSSSGWTAGAAAYYVGYLQPRTFLLKYNENGTITDAVDCALDPLSETK
CTLKSFTVEKGIYQTSNFRVQPTESIVRFPNITNLCPFGEVFNATRFASV
YAWNRKRISNCVADYSVLYNSASFSTFKCYGVSPTKLNDLCFTNVYADSF
VIRGDEVRQIAPGQTGKIADYNYKLPDDFTGCVIAWNSNNLDSKVGGNYN
YLYRLFRKSNLKPFERDISTEIYQAGSTPCNGVEGFNCYFPLQSYGFQPT
NGVGYQPYRVVVLSFELLHAPATVCGPKKSTNLVKNKCVNFNFNGLTGTG
VLTESNKKFLPFQQFGRDIADTTDAVRDPQTLEILDITPCSFGGVSVITP
GTNTSNQVAVLYQDVNCTEVPVAIHADQLTPTWRVYSTGSNVFQTRAGCL
IGAEHVNNSYECDIPIGAGICASYQTQTNSPSRAGSVASQSIIAYTMSLG
AENSVAYSNNSIAIPTNFTISVTTEILPVSMTKTSVDCTMYICGDSTECS
NLLLQYGSFCTQLNRALTGIAVEQDKNTQEVFAQVKQIYKTPPIKDFGGF
NFSQILPDPSKPSKRSFIEDLLFNKVTLADAGFIKQYGDCLGDIAARDLI
CAQKFNGLTVLPPLLTDEMIAQYTSALLAGTITSGWTFGAGAALQIPFAM
QMAYRFNGIGVTQNVLYENQKLIANQFNSAIGKIQDSLSSTASALGKLQD
VVNQNAQALNTLVKQLSSNFGAISSVLNDILSRLDPPEAEVQIDRLITGR
LQSLQTYVTQQLIRAAEIRASANLAATKMSECVLGQSKRVDFCGKGYHLM
SFPQSAPHGVVFLHVTYVPAQEKNFTTAPAICHDGKAHFPREGVFVSNGT
HWFVTQRNFYEPQIITTDNTFVSGNCDVVIGIVNNTVYDPLQPELDSFKE
ELDKYFKNHTSPDVDLGDISGINASVVNIQKEIDRLNEVAKNLNESLIDL
QELGKYEQGSGYIPEAPRDGQAYVRKDGEWVLLSTFLGRSLEVLFQGPGS LPETGGGSDYKDDDDKGGGGSGGGGSGGGGSGGGGSGGGGSHHHHHH

[0132] SEQ ID NO 4: foldon

GYIPEAPRDGQAYVRKDGEWVLLSTFL

[0133] SEQ ID NO 5: WT soluble S (ectodomain)

MFVFLVLLPLVSSQCVNLTTRTQLPPAYTNSFTRGVYYPDKVFRSSVLHS
TQDLFLPFFSNVTWFHAIHVSGTNGTKRFDNPVLPFNDGVYFASTEKSNI
IRGWIFGTTLDSKTQSLLIVNNATNVVIKVCEFQFCNDPFLGVYYHKNNK
SWMESEFRVYSSANNCTFEYVSQPFLMDLEGKQGNFKNLREFVFKNIDGY
FKIYSKHTPINLVRDLPQGFSALEPLVDLPIGINITRFQTLLALHRSYLT
PGDSSSGWTAGAAAYYVGYLQPRTFLLKYNENGTITDAVDCALDPLSETK
CTLKSFTVEKGIYQTSNFRVQPTESIVRFPNITNLCPFGEVFNATRFASV
YAWNRKRISNCVADYSVLYNSASFSTFKCYGVSPTKLNDLCFTNVYADSF
VIRGDEVRQIAPGQTGKIADYNYKLPDDFTGCVIAWNSNNLDSKVGGNYN
YLYRLFRKSNLKPFERDISTEIYQAGSTPCNGVEGFNCYFPLQSYGFQPT
NGVGYQPYRVVVLSFELLHAPATVCGPKKSTNLVKNKCVNFNFNGLTGTG
VLTESNKKFLPFQQFGRDIADTTDAVRDPQTLEILDITPCSFGGVSVITP
GTNTSNQVAVLYQDVNCTEVPVAIHADQLTPTWRVYSTGSNVFQTRAGCL
IGAEHVNNSYECDIPIGAGICASYQTQTNSPRRARSVASQSIIAYTMSLG
AENSVAYSNNSIAIPTNFTISVTTEILPVSMTKTSVDCTMYICGDSTECS
NLLLQYGSFCTQLNRALTGIAVEQDKNTQEVFAQVKQIYKTPPIKDFGGF
NFSQILPDPSKPSKRSFIEDLLFNKVTLADAGFIKQYGDCLGDIAARDLI
CAQKFNGLTVLPPLLTDEMIAQYTSALLAGTITSGWTFGAGAALQIPFAM
QMAYRFNGIGVTQNVLYENQKLIANQFNSAIGKIQDSLSSTASALGKLQD
VVNQNAQALNTLVKQLSSNFGAISSVLNDILSRLDKVEAEVQIDRLITGR
LQSLQTYVTQQLIRAAEIRASANLAATKMSECVLGQSKRVDFCGKGYHLM
SFPQSAPHGVVFLHVTYVPAQEKNFTTAPAICHDGKAHFPREGVFVSNGT
HWFVTQRNFYEPQIITTDNTFVSGNCDVVIGIVNNTVYDPLQPELDSFKE
ELDKYFKNHTSPDVDLGDISGINASVVNIQKEIDRLNEVAKNLNESLIDL
QELGKYEQ

[0134] SEQ ID NO 6: WT full length S + Furin KO

MFVFLVLLPLVSSQCVNLTTRTQLPPAYTNSFTRGVYYPDKVFRSSVLHS
TQDLFLPFFSNVTWFHAIHVSGTNGTKRFDNPVLPFNDGVYFASTEKSNI
IRGWIFGTTLDSKTQSLLIVNNATNVVIKVCEFQFCNDPFLGVYYHKNNK
SWMESEFRVYSSANNCTFEYVSQPFLMDLEGKQGNFKNLREFVFKNIDGY
FKIYSKHTPINLVRDLPQGFSALEPLVDLPIGINITRFQTLLALHRSYLT
PGDSSSGWTAGAAAYYVGYLQPRTFLLKYNENGTITDAVDCALDPLSETK
CTLKSFTVEKGIYQTSNFRVQPTESIVRFPNITNLCPFGEVFNATRFASV
YAWNRKRISNCVADYSVLYNSASFSTFKCYGVSPTKLNDLCFTNVYADSF
VIRGDEVRQIAPGQTGKIADYNYKLPDDFTGCVIAWNSNNLDSKVGGNYN
YLYRLFRKSNLKPFERDISTEIYQAGSTPCNGVEGFNCYFPLQSYGFQPT
NGVGYQPYRVVVLSFELLHAPATVCGPKKSTNLVKNKCVNFNFNGLTGTG
VLTESNKKFLPFQQFGRDIADTTDAVRDPQTLEILDITPCSFGGVSVITP
GTNTSNQVAVLYQDVNCTEVPVAIHADQLTPTWRVYSTGSNVFQTRAGCL
IGAEHVNNSYECDIPIGAGICASYQTQTNSPSRAGSVASQSIIAYTMSLG
AENSVAYSNNSIAIPTNFTISVTTEILPVSMTKTSVDCTMYICGDSTECS
NLLLQYGSFCTQLNRALTGIAVEQDKNTQEVFAQVKQIYKTPPIKDFGGF
NFSQILPDPSKPSKRSFIEDLLFNKVTLADAGFIKQYGDCLGDIAARDLI
CAQKFNGLTVLPPLLTDEMIAQYTSALLAGTITSGWTFGAGAALQIPFAM
QMAYRFNGIGVTQNVLYENQKLIANQFNSAIGKIQDSLSSTASALGKLQD
VVNQNAQALNTLVKQLSSNFGAISSVLNDiLSRLDKVEAEVQIDRLITGR
LQSLQTYVTQQLIRAAEIRASANLAATKMSECVLGQSKRVDFCGKGYHLM
SFPQSAPHGVVFLHVTYVPAQEKNFTTAPAICHDGKAHFPREGVFVSNGT
HWFVTQRNFYEPQIITTDNTFVSGNCDVVIGIVNNTVYDPLQPELDSFKE
ELDKYFKNHTSPDVDLGDISGINASVVNIQKEIDRLNEVAKNLNESLIDL
QELGKYEQYIKWPWYIWLGFIAGLIAIVMVTIMLCCMTSCCSCLKGCCSC
GSCCKFDEDDSEPVLKGVKLHYT

[0135] SEQ ID NO 7: WT soluble S + Furin KO

MFVFLVLLPLVSSQCVNLTTRTQLPPAYTNSFTRGVYYPDKVFRSSVLHS
TQDLFLPFFSNVTWFHAIHVSGTNGTKRFDNPVLPFNDGVYFASTEKSNI
IRGWIFGTTLDSKTQSLLIVNNATNVVIKVCEFQFCNDPFLGVYYHKNNK
SWMESEFRVYSSANNCTFEYVSQPFLMDLEGKQGNFKNLREFVFKNIDGY
FKIYSKHTPINLVRDLPQGFSALEPLVDLPIGINITRFQTLLALHRSYLT
PGDSSSGWTAGAAAYYVGYLQPRTFLLKYNENGTITDAVDCALDPLSETK
CTLKSFTVEKGIYQTSNFRVQPTESIVRFPNITNLCPFGEVFNATRFASV
YAWNRKRISNCVADYSVLYNSASFSTFKCYGVSPTKLNDLCFTNVYADSF
VIRGDEVRQIAPGQTGKIADYNYKLPDDFTGCVIAWNSNNLDSKVGGNYN
YLYRLFRKSNLKPFERDISTEIYQAGSTPCNGVEGFNCYFPLQSYGFQPT
NGVGYQPYRVVVLSFELLHAPATVCGPKKSTNLVKNKCVNFNFNGLTGTG
VLTESNKKFLPFQQFGRDIADTTDAVRDPQTLEILDITPCSFGGVSVITP
GTNTSNQVAVLYQDVNCTEVPVAIHADQLTPTWRVYSTGSNVFQTRAGCL
IGAEHVNNSYECDIPIGAGICASYQTQTNSPSRAGSVASQSIIAYTMSLG
AENSVAYSNNSIAIPTNFTISVTTEILPVSMTKTSVDCTMYICGDSTECS
NLLLQYGSFCTQLNRALTGIAVEQDKNTQEVFAQVKQIYKTPPIKDFGGF
NFSQILPDPSKPSKRSFIEDLLFNKVTLADAGFIKQYGDCLGDIAARDLI
CAQKFNGLTVLPPLLTDEMIAQYTSALLAGTITSGWTFGAGAALQIPFAM
QMAYRFNGIGVTQNVLYENQKLIANQFNSAIGKIQDSLSSTASALGKLQD
VVNQNAQALNTLVKQLSSNFGAISSVLNDILSRLDKVEAEVQIDRLITGR
LQSLQTYVTQQLIRAAEIRASANLAATKMSECVLGQSKRVDFCGKGYHLM
SFPQSAPHGVVFLHVTYVPAQEKNFTTAPAICHDGKAHFPREGVFVSNGT
HWFVTQRNFYEPQIITTDNTFVSGNCDVVIGIVNNTVYDPLQPELDSFKE
ELDKYFKNHTSPDVDLGDISGINASVVNIQKEIDRLNEVAKNLNESLIDL
QELGKYEQ

[0136] SEQ ID NO 8: SEQ ID NO 1 + T941G

MFVFLVLLPLVSSQCVNLTTRTQLPPAYTNSFTRGVYYPDKVFRSSVLHS
TQDLFLPFFSNVTWFHAIHVSGTNGTKRFDNPVLPFNDGVYFASTEKSNI
IRGWIFGTTLDSKTQSLLIVNNATNVVIKVCEFQFCNDPFLGVYYHKNNK
SWMESEFRVYSSANNCTFEYVSQPFLMDLEGKQGNFKNLREFVFKNIDGY
FKIYSKHTPINLVRDLPQGFSALEPLVDLPIGINITRFQTLLALHRSYLT
PGDSSSGWTAGAAAYYVGYLQPRTFLLKYNENGTITDAVDCALDPLSETK
CTLKSFTVEKGIYQTSNFRVQPTESIVRFPNITNLCPFGEVFNATRFASV
YAWNRKRISNCVADYSVLYNSASFSTFKCYGVSPTKLNDLCFTNVYADSF
VIRGDEVRQIAPGQTGKIADYNYKLPDDFTGCVIAWNSNNLDSKVGGNYN
YLYRLFRKSNLKPFERDISTEIYQAGSTPCNGVEGFNCYFPLQSYGFQPT
NGVGYQPYRVVVLSFELLHAPATVCGPKKSTNLVKNKCVNFNFNGLTGTG
VLTESNKKFLPFQQFGRDIADTTDAVRDPQTLEILDITPCSFGGVSVITP
GTNTSNQVAVLYQDVNCTEVPVAIHADQLTPTWRVYSTGSNVFQTRAGCL
IGAEHVNNSYECDIPIGAGICASYQTQTNSPRRARSVASQSIIAYTMSLG
AENSVAYSNNSIAIPTNFTISVTTEILPVSMTKTSVDCTMYICGDSTECS
NLLLQYGSFCTQLNRALTGIAVEQDKNTQEVFAQVKQIYKTPPIKDFGGF
NFSQILPDPSKPSKRSFIEDLLFNKVTLADAGFIKQYGDCLGDIAARDLI
CAQKFNGLTVLPPLLTDEMIAQYTSALLAGTITSGWTFGAGAALQIPFAM
QMAYRFNGIGVTQNVLYENQKLIANQFNSAIGKIQDSLSSGASALGKLQD
VVNQNAQALNTLVKQLSSNFGAISSVLNDILSRLDKVEAEVQIDRLITGR
LQSLQTYVTQQLIRAAEIRASANLAATKMSECVLGQSKRVDFCGKGYHLM
SFPQSAPHGVVFLHVTYVPAQEKNFTTAPAICHDGKAHFPREGVFVSNGT
HWFVTQRNFYEPQIITTDNTFVSGNCDVVIGIVNNTVYDPLQPELDSFKE
ELDKYFKNHTSPDVDLGDISGINASVVNIQKEIDRLNEVAKNLNESLIDL
QELGKYEQYIKWPWYIWLGFIAGLIAIVMVTIMLCCMTSCCSCLKGCCSC
GSCCKFDEDDSEPVLKGVKLHYT

[0137] SEQ ID NO 9: SEQ ID NO 1 + S943G

MFVFLVLLPLVSSQCVNLTTRTQLPPAYTNSFTRGVYYPDKVFRSSVLHS
TQDLFLPFFSNVTWFHAIHVSGTNGTKRFDNPVLPFNDGVYFASTEKSNI
IRGWIFGTTLDSKTQSLLIVNNATNVVIKVCEFQFCNDPFLGVYYHKNNK
SWMESEFRVYSSANNCTFEYVSQPFLMDLEGKQGNFKNLREFVFKNIDGY
FKIYSKHTPINLVRDLPQGFSALEPLVDLPIGINITRFQTLLALHRSYLT
PGDSSSGWTAGAAAYYVGYLQPRTFLLKYNENGTITDAVDCALDPLSETK
CTLKSFTVEKGIYQTSNFRVQPTESIVRFPNITNLCPFGEVFNATRFASV
YAWNRKRISNCVADYSVLYNSASFSTFKCYGVSPTKLNDLCFTNVYADSF
VIRGDEVRQIAPGQTGKIADYNYKLPDDFTGCVIAWNSNNLDSKVGGNYN
YLYRLFRKSNLKPFERDISTEIYQAGSTPCNGVEGFNCYFPLQSYGFQPT
NGVGYQPYRVVVLSFELLHAPATVCGPKKSTNLVKNKCVNFNFNGLTGTG
VLTESNKKFLPFQQFGRDIADTTDAVRDPQTLEILDITPCSFGGVSVITP
GTNTSNQVAVLYQDVNCTEVPVAIHADQLTPTWRVYSTGSNVFQTRAGCL
IGAEHVNNSYECDIPIGAGICASYQTQTNSPRRARSVASQSIIAYTMSLG
AENSVAYSNNSIAIPTNFTISVTTEILPVSMTKTSVDCTMYICGDSTECS
NLLLQYGSFCTQLNRALTGIAVEQDKNTQEVFAQVKQIYKTPPIKDFGGF
NFSQILPDPSKPSKRSFIEDLLFNKVTLADAGFIKQYGDCLGDIAARDLI
CAQKFNGLTVLPPLLTDEMIAQYTSALLAGTITSGWTFGAGAALQIPFAM
QMAYRFNGIGVTQNVLYENQKLIANQFNSAIGKIQDSLSSTAGALGKLQD
VVNQNAQALNTLVKQLSSNFGAISSVLNDILSRLDKVEAEVQIDRLITGR
LQSLQTYVTQQLIRAAEIRASANLAATKMSECVLGQSKRVDFCGKGYHLM
SFPQSAPHGVVFLHVTYVPAQEKNFTTAPAICHDGKAHFPREGVFVSNGT
HWFVTQRNFYEPQIITTDNTFVSGNCDVVIGIVNNTVYDPLQPELDSFKE
ELDKYFKNHTSPDVDLGDISGINASVVNIQKEIDRLNEVAKNLNESLIDL
QELGKYEQYIKWPWYIWLGFIAGLIAIVMVTIMLCCMTSCCSCLKGCCSC
GSCCKFDEDDSEPVLKGVKLHYT

[0138] SEQ ID NO 10: SEQ ID NO 1 + D614N + A892P + A942P + T941G

MFVFLVLLPLVSSQCVNLTTRTQLPPAYTNSFTRGVYYPDKVFRSSVLHS
TQDLFLPFFSNVTWFHAIHVSGTNGTKRFDNPVLPFNDGVYFASTEKSNI
IRGWIFGTTLDSKTQSLLIVNNATNVVIKVCEFQFCNDPFLGVYYHKNNK
SWMESEFRVYSSANNCTFEYVSQPFLMDLEGKQGNFKNLREFVFKNIDGY
FKIYSKHTPINLVRDLPQGFSALEPLVDLPIGINITRFQTLLALHRSYLT
PGDSSSGWTAGAAAYYVGYLQPRTFLLKYNENGTITDAVDCALDPLSETK
CTLKSFTVEKGIYQTSNFRVQPTESIVRFPNITNLCPFGEVFNATRFASV
YAWNRKRISNCVADYSVLYNSASFSTFKCYGVSPTKLNDLCFTNVYADSF
VIRGDEVRQIAPGQTGKIADYNYKLPDDFTGCVIAWNSNNLDSKVGGNYN
YLYRLFRKSNLKPFERDISTEIYQAGSTPCNGVEGFNCYFPLQSYGFQPT
NGVGYQPYRVVVLSFELLHAPATVCGPKKSTNLVKNKCVNFNFNGLTGTG
VLTESNKKFLPFQQFGRDIADTTDAVRDPQTLEILDITPCSFGGVSVITP
GTNTSNQVAVLYQNVNCTEVPVAIHADQLTPTWRVYSTGSNVFQTRAGCL
IGAEHVNNSYECDIPIGAGICASYQTQTNSPRRARSVASQSIIAYTMSLG
AENSVAYSNNSIAIPTNFTISVTTEILPVSMTKTSVDCTMYICGDSTECS
NLLLQYGSFCTQLNRALTGIAVEQDKNTQEVFAQVKQIYKTPPIKDFGGF
NFSQILPDPSKPSKRSFIEDLLFNKVTLADAGFIKQYGDCLGDIAARDLI
CAQKFNGLTVLPPLLTDEMIAQYTSALLAGTITSGWTFGAGPALQIPFAM
QMAYRFNGIGVTQNVLYENQKLIANQFNSAIGKIQDSLSSGPSALGKLQD
VVNQNAQALNTLVKQLSSNFGAISSVLNDILSRLDKVEAEVQIDRLITGR
LQSLQTYVTQQLIRAAEIRASANLAATKMSECVLGQSKRVDFCGKGYHLM
SFPQSAPHGVVFLHVTYVPAQEKNFTTAPAICHDGKAHFPREGVFVSNGT
HWFVTQRNFYEPQIITTDNTFVSGNCDVVIGIVNNTVYDPLQPELDSFKE
ELDKYFKNHTSPDVDLGDISGINASVVNIQKEIDRLNEVAKNLNESLIDL
QELGKYEQYIKWPWYIWLGFIAGLIAIVMVTIMLCCMTSCCSCLKGCCSC
GSCCKFDEDDSEPVLKGVKLHYT

[0139] SEQ ID NO 11: SEQ ID NO 1 + D614N + A892P + A942P + S943G

MFVFLVLLPLVSSQCVNLTTRTQLPPAYTNSFTRGVYYPDKVFRSSVLHS
TQDLFLPFFSNVTWFHAIHVSGTNGTKRFDNPVLPFNDGVYFASTEKSNI
IRGWIFGTTLDSKTQSLLIVNNATNVVIKVCEFQFCNDPFLGVYYHKNNK
SWMESEFRVYSSANNCTFEYVSQPFLMDLEGKQGNFKNLREFVFKNIDGY
FKIYSKHTPINLVRDLPQGFSALEPLVDLPIGINITRFQTLLALHRSYLT
PGDSSSGWTAGAAAYYVGYLQPRTFLLKYNENGTITDAVDCALDPLSETK
CTLKSFTVEKGIYQTSNFRVQPTESIVRFPNITNLCPFGEVFNATRFASV
YAWNRKRISNCVADYSVLYNSASFSTFKCYGVSPTKLNDLCFTNVYADSF
VIRGDEVRQIAPGQTGKIADYNYKLPDDFTGCVIAWNSNNLDSKVGGNYN
YLYRLFRKSNLKPFERDISTEIYQAGSTPCNGVEGFNCYFPLQSYGFQPT
NGVGYQPYRVVVLSFELLHAPATVCGPKKSTNLVKNKCVNFNFNGLTGTG
VLTESNKKFLPFQQFGRDIADTTDAVRDPQTLEILDITPCSFGGVSVITP
GTNTSNQVAVLYQNVNCTEVPVAIHADQLTPTWRVYSTGSNVFQTRAGCL
IGAEHVNNSYECDIPIGAGICASYQTQTNSPRRARSVASQSIIAYTMSLG
AENSVAYSNNSIAIPTNFTISVTTEILPVSMTKTSVDCTMYICGDSTECS
NLLLQYGSFCTQLNRALTGIAVEQDKNTQEVFAQVKQIYKTPPIKDFGGF
NFSQILPDPSKPSKRSFIEDLLFNKVTLADAGFIKQYGDCLGDIAARDLI
CAQKFNGLTVLPPLLTDEMIAQYTSALLAGTITSGWTFGAGPALQIPFAM
QMAYRFNGIGVTQNVLYENQKLIANQFNSAIGKIQDSLSSTPGALGKLOQ
DVVNQNAQALNTLVKQLSSNFGAISSVLNDILSRLDKVEAEVQIDRLITG
RLOSLQTYVTQQLIRAAEIRASANLAATKMSECVLGQSKRVDFCGKGYHL
MSFPQSAPHGVVFLHVTYVPAQEKNFTTAPAICHDGKAHFPREGVFVSNG
THWFVTQRNFYEPQIITTDNTFVSGNCDVVIGIVNNTVYDPLQPELDSFK
EELDKYFKNHTSPDVDLGDISGINASVVNIQKEIDRLNEVAKNLNESLID
LQELGKYEQYIKWPWYIWLGFIAGLIAIVMVTIMLCCMTSCCSCLKGCCS
CGSCCKFDEDDSEPVLKGVKLHYT

[0140] SEQ ID NO 12: SEQ ID NO 1 + D614N + A892P + A942P + T941G + S943G

MFVFLVLLPLVSSQCVNLTTRTQLPPAYTNSFTRGVYYPDKVFRSSVLHS
TQDLFLPFFSNVTWFHAIHVSGTNGTKRFDNPVLPFNDGVYFASTEKSNI
IRGWIFGTTLDSKTQSLLIVNNATNVVIKVCEFQFCNDPFLGVYYHKNNK
SWMESEFRVYSSANNCTFEYVSQPFLMDLEGKQGNFKNLREFVFKNIDGY
FKIYSKHTPINLVRDLPQGFSALEPLVDLPIGINITRFQTLLALHRSYLT
PGDSSSGWTAGAAAYYVGYLQPRTFLLKYNENGTITDAVDCALDPLSETK
CTLKSFTVEKGIYQTSNFRVQPTESIVRFPNITNLCPFGEVFNATRFASV
YAWNRKRISNCVADYSVLYNSASFSTFKCYGVSPTKLNDLCFTNVYADSF
VIRGDEVRQIAPGQTGKIADYNYKLPDDFTGCVIAWNSNNLDSKVGGNYN
YLYRLFRKSNLKPFERDISTEIYQAGSTPCNGVEGFNCYFPLQSYGFQPT
NGVGYQPYRVVVLSFELLHAPATVCGPKKSTNLVKNKCVNFNFNGLTGTG
VLTESNKKFLPFQQFGRDIADTTDAVRDPQTLEILDITPCSFGGVSVITP
GTNTSNQVAVLYQNVNCTEVPVAIHADQLTPTWRVYSTGSNVFQTRAGCL
IGAEHVNNSYECDIPIGAGICASYQTQTNSPRRARSVASQSIIAYTMSLG
AENSVAYSNNSIAIPTNFTISVTTEILPVSMTKTSVDCTMYICGDSTECS
NLLLQYGSFCTQLNRALTGIAVEQDKNTQEVFAQVKQIYKTPPIKDFGGF
NFSQILPDPSKPSKRSFIEDLLFNKVTLADAGFIKQYGDCLGDIAARDLI
CAQKFNGLTVLPPLLTDEMIAQYTSALLAGTITSGWTFGAGPALQIPFAM
QMAYRFNGIGVTQNVLYENQKLIANQFNSAIGKIQDSLSSGPGALGKLQD
VVNQNAQALNTLVKQLSSNFGAISSVLNDILSRLDKVEAEVQIDRLITGR
LQSLQTYVTQQLIRAAEIRASANLAATKMSECVLGQSKRVDFCGKGYHLM
SFPQSAPHGVVFLHVTYVPAQEKNFTTAPAICHDGKAHFPREGVFVSNGT
HWFVTQRNFYEPQIITTDNTFVSGNCDVVIGIVNNTVYDPLQPELDSFKE
ELDKYFKNHTSPDVDLGDISGINASVVNIQKEIDRLNEVAKNLNESLIDL
QELGKYEQYIKWPWYIWLGFIAGLIAIVMVTIMLCCMTSCCSCLKGCCSC
GSCCKFDEDDSEPVLKGVKLHYT

[0141] SEQ ID NO 13: SEQ ID NO 1 + D614N + A892P + A942P + T941G + A944P

MFVFLVLLPLVSSQCVNLTTRTQLPPAYTNSFTRGVYYPDKVFRSSVLHS
TQDLFLPFFSNVTWFHAIHVSGTNGTKRFDNPVLPFNDGVYFASTEKSNI
IRGWIFGTTLDSKTQSLLIVNNATNVVIKVCEFQFCNDPFLGVYYHKNNK
SWMESEFRVYSSANNCTFEYVSQPFLMDLEGKQGNFKNLREFVFKNIDGY
FKIYSKHTPINLVRDLPQGFSALEPLVDLPIGINITRFQTLLALHRSYLT
PGDSSSGWTAGAAAYYVGYLQPRTFLLKYNENGTITDAVDCALDPLSETK
CTLKSFTVEKGIYQTSNFRVQPTESIVRFPNITNLCPFGEVFNATRFASV
YAWNRKRISNCVADYSVLYNSASFSTFKCYGVSPTKLNDLCFTNVYADSF
VIRGDEVRQIAPGQTGKIADYNYKLPDDFTGCVIAWNSNNLDSKVGGNYN
YLYRLFRKSNLKPFERDISTEIYQAGSTPCNGVEGFNCYFPLQSYGFQPT
NGVGYQPYRVVVLSFELLHAPATVCGPKKSTNLVKNKCVNFNFNGLTGTG
VLTESNKKFLPFQQFGRDIADTTDAVRDPQTLEILDITPCSFGGVSVITP
GTNTSNQVAVLYQNVNCTEVPVAIHADQLTPTWRVYSTGSNVFQTRAGCL
IGAEHVNNSYECDIPIGAGICASYQTQTNSPRRARSVASQSIIAYTMSLG
AENSVAYSNNSIAIPTNFTISVTTEILPVSMTKTSVDCTMYICGDSTECS
NLLLQYGSFCTQLNRALTGIAVEQDKNTQEVFAQVKQIYKTPPIKDFGGF
NFSQILPDPSKPSKRSFIEDLLFNKVTLADAGFIKQYGDCLGDIAARDLI
CAQKFNGLTVLPPLLTDEMIAQYTSALLAGTITSGWTFGAGPALQIPFAM
QMAYRFNGIGVTQNVLYENQKLIANQFNSAIGKIQDSLSSGPSPLGKLQD
VVNQNAQALNTLVKQLSSNFGAISSVLNDILSRLDKVEAEVQIDRLITGR
LQSLQTYVTQQLIRAAEIRASANLAATKMSECVLGQSKRVDFCGKGYHLM
SFPQSAPHGVVFLHVTYVPAQEKNFTTAPAICHDGKAHFPREGVFVSNGT
HWFVTQRNFYEPQIITTDNTFVSGNCDVVIGIVNNTVYDPLQPELDSFKE
ELDKYFKNHTSPDVDLGDISGINASVVNIQKEIDRLNEVAKNLNESLIDL
QELGKYEQYIKWPWYIWLGFIAGLIAIVMVTIMLCCMTSCCSCLKGCCSC
GSCCKFDEDDSEPVLKGVKLHYT

[0142] SEQ ID NO 14: SEQ ID NO 1 + D614N + A892P + A942P + S943G + A944P

MFVFLVLLPLVSSQCVNLTTRTQLPPAYTNSFTRGVYYPDKVFRSSVLHS
TQDLFLPFFSNVTWFHAIHVSGTNGTKRFDNPVLPFNDGVYFASTEKSNI
IRGWIFGTTLDSKTQSLLIVNNATNVVIKVCEFQFCNDPFLGVYYHKNNK
SWMESEFRVYSSANNCTFEYVSQPFLMDLEGKQGNFKNLREFVFKNIDGY
FKIYSKHTPINLVRDLPQGFSALEPLVDLPIGINITRFQTLLALHRSYLT
PGDSSSGWTAGAAAYYVGYLQPRTFLLKYNENGTITDAVDCALDPLSETK
CTLKSFTVEKGIYQTSNFRVQPTESIVRFPNITNLCPFGEVFNATRFASV
YAWNRKRISNCVADYSVLYNSASFSTFKCYGVSPTKLNDLCFTNVYADSF
VIRGDEVRQIAPGQTGKIADYNYKLPDDFTGCVIAWNSNNLDSKVGGNYN
YLYRLFRKSNLKPFERDISTEIYQAGSTPCNGVEGFNCYFPLQSYGFQPT
NGVGYQPYRVVVLSFELLHAPATVCGPKKSTNLVKNKCVNFNFNGLTGTG
VLTESNKKFLPFQQFGRDIADTTDAVRDPQTLEILDITPCSFGGVSVITP
GTNTSNQVAVLYQNVNCTEVPVAIHADQLTPTWRVYSTGSNVFQTRAGCL
IGAEHVNNSYECDIPIGAGICASYQTQTNSPRRARSVASQSIIAYTMSLG
AENSVAYSNNSIAIPTNFTISVTTEILPVSMTKTSVDCTMYICGDSTECS
NLLLQYGSFCTQLNRALTGIAVEQDKNTQEVFAQVKQIYKTPPIKDFGGF
NFSQILPDPSKPSKRSFIEDLLFNKVTLADAGFIKQYGDCLGDIAARDLI
CAQKFNGLTVLPPLLTDEMIAQYTSALLAGTITSGWTFGAGPALQIPFAM
QMAYRFNGIGVTQNVLYENQKLIANQFNSAIGKIQDSLSSTPGPLGKLQD
VVNQNAQALNTLVKQLSSNFGAISSVLNDILSRLDKVEAEVQIDRLITGR
LQSLQTYVTQQLIRAAEIRASANLAATKMSECVLGQSKRVDFCGKGYHLM
SFPQSAPHGVVFLHVTYVPAQEKNFTTAPAICHDGKAHFPREGVFVSNGT
HWFVTQRNFYEPQIITTDNTFVSGNCDVVIGIVNNTVYDPLQPELDSFKE
ELDKYFKNHTSPDVDLGDISGINASVVNIQKEIDRLNEVAKNLNESLIDL
QELGKYEQYIKWPWYIWLGFIAGLIAIVMVTIMLCCMTSCCSCLKGCCSC
GSCCKFDEDDSEPVLKGVKLHYT

[0143] SEQ ID NO 15: SEQ ID NO 1 + T941G + K986P

MFVFLVLLPLVSSQCVNLTTRTQLPPAYTNSFTRGVYYPDKVFRSSVLHS
TQDLFLPFFSNVTWFHAIHVSGTNGTKRFDNPVLPFNDGVYFASTEKSNI
IRGWIFGTTLDSKTQSLLIVNNATNVVIKVCEFQFCNDPFLGVYYHKNNK
SWMESEFRVYSSANNCTFEYVSQPFLMDLEGKQGNFKNLREFVFKNIDGY
FKIYSKHTPINLVRDLPQGFSALEPLVDLPIGINITRFQTLLALHRSYLT
PGDSSSGWTAGAAAYYVGYLQPRTFLLKYNENGTITDAVDCALDPLSETK
CTLKSFTVEKGIYQTSNFRVQPTESIVRFPNITNLCPFGEVFNATRFASV
YAWNRKRISNCVADYSVLYNSASFSTFKCYGVSPTKLNDLCFTNVYADSF
VIRGDEVRQIAPGQTGKIADYNYKLPDDFTGCVIAWNSNNLDSKVGGNYN
YLYRLFRKSNLKPFERDISTEIYQAGSTPCNGVEGFNCYFPLQSYGFQPT
NGVGYQPYRVVVLSFELLHAPATVCGPKKSTNLVKNKCVNFNFNGLTGTG
VLTESNKKFLPFQQFGRDIADTTDAVRDPQTLEILDITPCSFGGVSVITP
GTNTSNQVAVLYQDVNCTEVPVAIHADQLTPTWRVYSTGSNVFQTRAGCL
IGAEHVNNSYECDIPIGAGICASYQTQTNSPRRARSVASQSIIAYTMSLG
AENSVAYSNNSIAIPTNFTISVTTEILPVSMTKTSVDCTMYICGDSTECS
NLLLQYGSFCTQLNRALTGIAVEQDKNTQEVFAQVKQIYKTPPIKDFGGF
NFSQILPDPSKPSKRSFIEDLLFNKVTLADAGFIKQYGDCLGDIAARDLI
CAQKFNGLTVLPPLLTDEMIAQYTSALLAGTITSGWTFGAGAALQIPFAM
QMAYRFNGIGVTQNVLYENQKLIANQFNSAIGKIQDSLSSGASALGKLQD
VVNQNAQALNTLVKQLSSNFGAISSVLNDILSRLDPVEAEVQIDRLITGR
LQSLQTYVTQQLIRAAEIRASANLAATKMSECVLGQSKRVDFCGKGYHLM
SFPQSAPHGVVFLHVTYVPAQEKNFTTAPAICHDGKAHFPREGVFVSNGT
HWFVTQRNFYEPQIITTDNTFVSGNCDVVIGIVNNTVYDPLQPELDSFKE
ELDKYFKNHTSPDVDLGDISGINASVVNIQKEIDRLNEVAKNLNESLIDL
QELGKYEQYIKWPWYIWLGFIAGLIAIVMVTIMLCCMTSCCSCLKGCCSC
GSCCKFDEDDSEPVLKGVKLHYT

[0144] SEQ ID NO 16: SEQ ID NO 1 + S943G + K986P

MFVFLVLLPLVSSQCVNLTTRTQLPPAYTNSFTRGVYYPDKVFRSSVLHS
TQDLFLPFFSNVTWFHAIHVSGTNGTKRFDNPVLPFNDGVYFASTEKSNI
IRGWIFGTTLDSKTQSLLIVNNATNVVIKVCEFQFCNDPFLGVYYHKNNK
SWMESEFRVYSSANNCTFEYVSQPFLMDLEGKQGNFKNLREFVFKNIDGY
FKIYSKHTPINLVRDLPQGFSALEPLVDLPIGINITRFQTLLALHRSYLT
PGDSSSGWTAGAAAYYVGYLQPRTFLLKYNENGTITDAVDCALDPLSETK
CTLKSFTVEKGIYQTSNFRVQPTESIVRFPNITNLCPFGEVFNATRFASV
YAWNRKRISNCVADYSVLYNSASFSTFKCYGVSPTKLNDLCFTNVYADSF
VIRGDEVRQIAPGQTGKIADYNYKLPDDFTGCVIAWNSNNLDSKVGGNYN
YLYRLFRKSNLKPFERDISTEIYQAGSTPCNGVEGFNCYFPLQSYGFQPT
NGVGYQPYRVVVLSFELLHAPATVCGPKKSTNLVKNKCVNFNFNGLTGTG
VLTESNKKFLPFQQFGRDIADTTDAVRDPQTLEILDITPCSFGGVSVITP
GTNTSNQVAVLYQDVNCTEVPVAIHADQLTPTWRVYSTGSNVFQTRAGCL
IGAEHVNNSYECDIPIGAGICASYQTQTNSPRRARSVASQSIIAYTMSLG
AENSVAYSNNSIAIPTNFTISVTTEILPVSMTKTSVDCTMYICGDSTECS
NLLLQYGSFCTQLNRALTGIAVEQDKNTQEVFAQVKQIYKTPPIKDFGGF
NFSQILPDPSKPSKRSFIEDLLFNKVTLADAGFIKQYGDCLGDIAARDLI
CAQKFNGLTVLPPLLTDEMIAQYTSALLAGTITSGWTFGAGAALQIPFAM
QMAYRFNGIGVTQNVLYENQKLIANQFNSAIGKIQDSLSSTAGALGKLQD
VVNQNAQALNTLVKQLSSNFGAISSVLNDILSRLDPVEAEVQIDRLITGR
LQSLQTYVTQQLIRAAEIRASANLAATKMSECVLGQSKRVDFCGKGYHLM
SFPQSAPHGVVFLHVTYVPAQEKNFTTAPAICHDGKAHFPREGVFVSNGT
HWFVTQRNFYEPQIITTDNTFVSGNCDVVIGIVNNTVYDPLQPELDSFKE
ELDKYFKNHTSPDVDLGDISGINASVVNIQKEIDRLNEVAKNLNESLIDL
QELGKYEQYIKWPWYIWLGFIAGLIAIVMVTIMLCCMTSCCSCLKGCCSC
GSCCKFDEDDSEPVLKGVKLHYT

[0145] SEQ ID NO 17: SEQ ID NO 1 + D614N + A892P + A942P + T941G + K986P

MFVFLVLLPLVSSQCVNLTTRTQLPPAYTNSFTRGVYYPDKVFRSSVLHS
TQDLFLPFFSNVTWFHAIHVSGTNGTKRFDNPVLPFNDGVYFASTEKSNI
IRGWIFGTTLDSKTQSLLIVNNATNVVIKVCEFQFCNDPFLGVYYHKNNK
SWMESEFRVYSSANNCTFEYVSQPFLMDLEGKQGNFKNLREFVFKNIDGY
FKIYSKHTPINLVRDLPQGFSALEPLVDLPIGINITRFQTLLALHRSYLT
PGDSSSGWTAGAAAYYVGYLQPRTFLLKYNENGTITDAVDCALDPLSETK
CTLKSFTVEKGIYQTSNFRVQPTESIVRFPNITNLCPFGEVFNATRFASV
YAWNRKRISNCVADYSVLYNSASFSTFKCYGVSPTKLNDLCFTNVYADSF
VIRGDEVRQIAPGQTGKIADYNYKLPDDFTGCVIAWNSNNLDSKVGGNYN
YLYRLFRKSNLKPFERDISTEIYQAGSTPCNGVEGFNCYFPLQSYGFQPT
NGVGYQPYRVVVLSFELLHAPATVCGPKKSTNLVKNKCVNFNFNGLTGTG
VLTESNKKFLPFQQFGRDIADTTDAVRDPQTLEILDITPCSFGGVSVITP
GTNTSNQVAVLYQNVNCTEVPVAIHADQLTPTWRVYSTGSNVFQTRAGCL
IGAEHVNNSYECDIPIGAGICASYQTQTNSPRRARSVASQSIIAYTMSLG
AENSVAYSNNSIAIPTNFTISVTTEILPVSMTKTSVDCTMYICGDSTECS
NLLLQYGSFCTQLNRALTGIAVEQDKNTQEVFAQVKQIYKTPPIKDFGGF
NFSQILPDPSKPSKRSFIEDLLFNKVTLADAGFIKQYGDCLGDIAARDLI
CAQKFNGLTVLPPLLTDEMIAQYTSALLAGTITSGWTFGAGPALQIPFAM
QMAYRFNGIGVTQNVLYENQKLIANQFNSAIGKIQDSLSSGPSALGKLQD
VVNQNAQALNTLVKQLSSNFGAISSVLNDILSRLDPVEAEVQIDRLITGR
LQSLQTYVTQQLIRAAEIRASANLAATKMSECVLGQSKRVDFCGKGYHLM
SFPQSAPHGVVFLHVTYVPAQEKNFTTAPAICHDGKAHFPREGVFVSNGT
HWFVTQRNFYEPQIITTDNTFVSGNCDVVIGIVNNTVYDPLQPELDSFKE
ELDKYFKNHTSPDVDLGDISGINASVVNIQKEIDRLNEVAKNLNESLIDL
QELGKYEQYIKWPWYIWLGFIAGLIAIVMVTIMLCCMTSCCSCLKGCCSC
GSCCKFDEDDSEPVLKGVKLHYT

[0146] SEQ ID NO 18: SEQ ID NO 1 + D614N + A892P + A942P + S943G + K986P

MFVFLVLLPLVSSQCVNLTTRTQLPPAYTNSFTRGVYYPDKVFRSSVLHS
TQDLFLPFFSNVTWFHAIHVSGTNGTKRFDNPVLPFNDGVYFASTEKSNI
IRGWIFGTTLDSKTQSLLIVNNATNVVIKVCEFQFCNDPFLGVYYHKNNK
SWMESEFRVYSSANNCTFEYVSQPFLMDLEGKQGNFKNLREFVFKNIDGY
FKIYSKHTPINLVRDLPQGFSALEPLVDLPIGINITRFQTLLALHRSYLT
PGDSSSGWTAGAAAYYVGYLQPRTFLLKYNENGTITDAVDCALDPLSETK
CTLKSFTVEKGIYQTSNFRVQPTESIVRFPNITNLCPFGEVFNATRFASV
YAWNRKRISNCVADYSVLYNSASFSTFKCYGVSPTKLNDLCFTNVYADSF
VIRGDEVRQIAPGQTGKIADYNYKLPDDFTGCVIAWNSNNLDSKVGGNYN
YLYRLFRKSNLKPFERDISTEIYQAGSTPCNGVEGFNCYFPLQSYGFQPT
NGVGYQPYRVVVLSFELLHAPATVCGPKKSTNLVKNKCVNFNFNGLTGTG
VLTESNKKFLPFQQFGRDIADTTDAVRDPQTLEILDITPCSFGGVSVITP
GTNTSNQVAVLYQNVNCTEVPVAIHADQLTPTWRVYSTGSNVFQTRAGCL
IGAEHVNNSYECDIPIGAGICASYQTQTNSPRRARSVASQSIIAYTMSLG
AENSVAYSNNSIAIPTNFTISVTTEILPVSMTKTSVDCTMYICGDSTECS
NLLLQYGSFCTQLNRALTGIAVEQDKNTQEVFAQVKQIYKTPPIKDFGGF
NFSQILPDPSKPSKRSFIEDLLFNKVTLADAGFIKQYGDCLGDIAARDLI
CAQKFNGLTVLPPLLTDEMIAQYTSALLAGTITSGWTFGAGPALQIPFAM
QMAYRFNGIGVTQNVLYENQKLIANQFNSAIGKIQDSLSSTPGALGKLQD
VVNQNAQALNTLVKQLSSNFGAISSVLNDILSRLDPVEAEVQIDRLITGR
LQSLQTYVTQQLIRAAEIRASANLAATKMSECVLGQSKRVDFCGKGYHLM
SFPQSAPHGVVFLHVTYVPAQEKNFTTAPAICHDGKAHFPREGVFVSNGT
HWFVTQRNFYEPQIITTDNTFVSGNCDVVIGIVNNTVYDPLQPELDSFKE
ELDKYFKNHTSPDVDLGDISGINASVVNIQKEIDRLNEVAKNLNESLIDL
QELGKYEQYIKWPWYIWLGFIAGLIAIVMVTIMLCCMTSCCSCLKGCCSC
GSCCKFDEDDSEPVLKGVKLHYT

[0147] SEQ ID NO 19: SEQ ID NO 1 + D614N + A892P + A942P + T941G + S943G + K986P

MFVFLVLLPLVSSQCVNLTTRTQLPPAYTNSFTRGVYYPDKVFRSSVLHS
TQDLFLPFFSNVTWFHAIHVSGTNGTKRFDNPVLPFNDGVYFASTEKSNI
IRGWIFGTTLDSKTQSLLIVNNATNVVIKVCEFQFCNDPFLGVYYHKNNK
SWMESEFRVYSSANNCTFEYVSQPFLMDLEGKQGNFKNLREFVFKNIDGY
FKIYSKHTPINLVRDLPQGFSALEPLVDLPIGINITRFQTLLALHRSYLT
PGDSSSGWTAGAAAYYVGYLQPRTFLLKYNENGTITDAVDCALDPLSETK
CTLKSFTVEKGIYQTSNFRVQPTESIVRFPNITNLCPFGEVFNATRFASV
YAWNRKRISNCVADYSVLYNSASFSTFKCYGVSPTKLNDLCFTNVYADSF
VIRGDEVRQIAPGQTGKIADYNYKLPDDFTGCVIAWNSNNLDSKVGGNYN
YLYRLFRKSNLKPFERDISTEIYQAGSTPCNGVEGFNCYFPLQSYGFQPT
NGVGYQPYRVVVLSFELLHAPATVCGPKKSTNLVKNKCVNFNFNGLTGTG
VLTESNKKFLPFQQFGRDIADTTDAVRDPQTLEILDITPCSFGGVSVITP
GTNTSNQVAVLYQNVNCTEVPVAIHADQLTPTWRVYSTGSNVFQTRAGCL
IGAEHVNNSYECDIPIGAGICASYQTQTNSPRRARSVASQSIIAYTMSLG
AENSVAYSNNSIAIPTNFTISVTTEILPVSMTKTSVDCTMYICGDSTECS
NLLLQYGSFCTQLNRALTGIAVEQDKNTQEVFAQVKQIYKTPPIKDFGGF
NFSQILPDPSKPSKRSFIEDLLFNKVTLADAGFIKQYGDCLGDIAARDLI
CAQKFNGLTVLPPLLTDEMIAQYTSALLAGTITSGWTFGAGPALQIPFAM
QMAYRFNGIGVTQNVLYENQKLIANQFNSAIGKIQDSLSSGPGALGKLQD
VVNQNAQALNTLVKQLSSNFGAISSVLNDILSRLDPVEAEVQIDRLITGR
LQSLQTYVTQQLIRAAEIRASANLAATKMSECVLGQSKRVDFCGKGYHLM
SFPQSAPHGVVFLHVTYVPAQEKNFTTAPAICHDGKAHFPREGVFVSNGT
HWFVTQRNFYEPQIITTDNTFVSGNCDVVIGIVNNTVYDPLQPELDSFKE
ELDKYFKNHTSPDVDLGDISGINASVVNIQKEIDRLNEVAKNLNESLIDL
QELGKYEQYIKWPWYIWLGFIAGLIAIVMVTIMLCCMTSCCSCLKGCCSC
GSCCKFDEDDSEPVLKGVKLHYT

[0148] SEQ ID NO 20: SEQ ID NO 1 + D614N + A892P + A942P + T941G + A944P + K986P

MFVFLVLLPLVSSQCVNLTTRTQLPPAYTNSFTRGVYYPDKVFRSSVLHS
TQDLFLPFFSNVTWFHAIHVSGTNGTKRFDNPVLPFNDGVYFASTEKSNI
IRGWIFGTTLDSKTQSLLIVNNATNVVIKVCEFQFCNDPFLGVYYHKNNK
SWMESEFRVYSSANNCTFEYVSQPFLMDLEGKQGNFKNLREFVFKNIDGY
FKIYSKHTPINLVRDLPQGFSALEPLVDLPIGINITRFQTLLALHRSYLT
PGDSSSGWTAGAAAYYVGYLQPRTFLLKYNENGTITDAVDCALDPLSETK
CTLKSFTVEKGIYQTSNFRVQPTESIVRFPNITNLCPFGEVFNATRFASV
YAWNRKRISNCVADYSVLYNSASFSTFKCYGVSPTKLNDLCFTNVYADSF
VIRGDEVRQIAPGQTGKIADYNYKLPDDFTGCVIAWNSNNLDSKVGGNYN
YLYRLFRKSNLKPFERDISTEIYQAGSTPCNGVEGFNCYFPLQSYGFQPT
NGVGYQPYRVVVLSFELLHAPATVCGPKKSTNLVKNKCVNFNFNGLTGTG
VLTESNKKFLPFQQFGRDIADTTDAVRDPQTLEILDITPCSFGGVSVITP
GTNTSNQVAVLYQNVNCTEVPVAIHADQLTPTWRVYSTGSNVFQTRAGCL
IGAEHVNNSYECDIPIGAGICASYQTQTNSPRRARSVASQSIIAYTMSLG
AENSVAYSNNSIAIPTNFTISVTTEILPVSMTKTSVDCTMYICGDSTECS
NLLLQYGSFCTQLNRALTGIAVEQDKNTQEVFAQVKQIYKTPPIKDFGGF
NFSQILPDPSKPSKRSFIEDLLFNKVTLADAGFIKQYGDCLGDIAARDLI
CAQKFNGLTVLPPLLTDEMIAQYTSALLAGTITSGWTFGAGPALQIPFAM
QMAYRFNGIGVTQNVLYENQKLIANQFNSAIGKIQDSLSSGPSPLGKLQD
VVNQNAQALNTLVKQLSSNFGAISSVLNDILSRLDPVEAEVQIDRLITGR
LQSLQTYVTQQLIRAAEIRASANLAATKMSECVLGQSKRVDFCGKGYHLM
SFPQSAPHGVVFLHVTYVPAQEKNFTTAPAICHDGKAHFPREGVFVSNGT
HWFVTQRNFYEPQIITTDNTFVSGNCDVVIGIVNNTVYDPLQPELDSFKE
ELDKYFKNHTSPDVDLGDISGINASVVNIQKEIDRLNEVAKNLNESLIDL
QELGKYEQYIKWPWYIWLGFIAGLIAIVMVTIMLCCMTSCCSCLKGCCSC
GSCCKFDEDDSEPVLKGVKLHYT

[0149] SEQ ID NO 21: SEQ ID NO 1 + D614N + A892P + A942P + S943G + A944P + K986P

MFVFLVLLPLVSSQCVNLTTRTQLPPAYTNSFTRGVYYPDKVFRSSVLHS
TQDLFLPFFSNVTWFHAIHVSGTNGTKRFDNPVLPFNDGVYFASTEKSNI
IRGWIFGTTLDSKTQSLLIVNNATNVVIKVCEFQFCNDPFLGVYYHKNNK
SWMESEFRVYSSANNCTFEYVSQPFLMDLEGKQGNFKNLREFVFKNIDGY
FKIYSKHTPINLVRDLPQGFSALEPLVDLPIGINITRFQTLLALHRSYLT
PGDSSSGWTAGAAAYYVGYLQPRTFLLKYNENGTITDAVDCALDPLSETK
CTLKSFTVEKGIYQTSNFRVQPTESIVRFPNITNLCPFGEVFNATRFASV
YAWNRKRISNCVADYSVLYNSASFSTFKCYGVSPTKLNDLCFTNVYADSF
VIRGDEVRQIAPGQTGKIADYNYKLPDDFTGCVIAWNSNNLDSKVGGNYN
YLYRLFRKSNLKPFERDISTEIYQAGSTPCNGVEGFNCYFPLQSYGFQPT
NGVGYQPYRVVVLSFELLHAPATVCGPKKSTNLVKNKCVNFNFNGLTGTG
VLTESNKKFLPFQQFGRDIADTTDAVRDPQTLEILDITPCSFGGVSVITP
GTNTSNQVAVLYQNVNCTEVPVAIHADQLTPTWRVYSTGSNVFQTRAGCL
IGAEHVNNSYECDIPIGAGICASYQTQTNSPRRARSVASQSIIAYTMSLG
AENSVAYSNNSIAIPTNFTISVTTEILPVSMTKTSVDCTMYICGDSTECS
NLLLQYGSFCTQLNRALTGIAVEQDKNTQEVFAQVKQIYKTPPIKDFGGF
NFSQILPDPSKPSKRSFIEDLLFNKVTLADAGFIKQYGDCLGDIAARDLI
CAQKFNGLTVLPPLLTDEMIAQYTSALLAGTITSGWTFGAGPALQIPFAM
QMAYRFNGIGVTQNVLYENQKLIANQFNSAIGKIQDSLSSTPGPLGKLQD
VVNQNAQALNTLVKQLSSNFGAISSVLNDILSRLDPVEAEVQIDRLITGR
LQSLQTYVTQQLIRAAEI RASANLAATKMSECVLGQSKRVDFCG KGYH
LMSFPQSAPHGVVFLHVTYVPAQE KN FTTAPAICHDGKAHFPREGVFV
SNGTHWFVTQRNFYEPQIITTDNTFVSGNCDVVIGIVNNTVYDPLQPELD
SFKEELDKYFKNHTSPDVDLGDISGINASVVNIQKEIDRLNEVAKNLNES
LIDLQELGKYEQYIKWPWYIWLGFIAGLIAIVMVTIMLCCMTSCCSCLKG
CCSCGSCCKFDEDDSEPVLKGVKLHYT

[0150] SEQ ID NO 22: SEQ ID NO 1 + T941G + V987P

MFVFLVLLPLVSSQCVNLTTRTQLPPAYTNSFTRGVYYPDKVFRSSVLHS
TQDLFLPFFSNVTWFHAIHVSGTNGTKRFDNPVLPFNDGVYFASTEKSNI
IRGWIFGTTLDSKTQSLLIVNNATNVVIKVCEFQFCNDPFLGVYYHKNNK
SWMESEFRVYSSANNCTFEYVSQPFLMDLEGKQGNFKNLREFVFKNIDGY
FKIYSKHTPINLVRDLPQGFSALEPLVDLPIGINITRFQTLLALHRSYLT
PGDSSSGWTAGAAAYYVGYLQPRTFLLKYNENGTITDAVDCALDPLSETK
CTLKSFTVEKGIYQTSNFRVQPTESIVRFPNITNLCPFGEVFNATRFASV
YAWNRKRISNCVADYSVLYNSASFSTFKCYGVSPTKLNDLCFTNVYADSF
VIRGDEVRQIAPGQTGKIADYNYKLPDDFTGCVIAWNSNNLDSKVGGNYN
YLYRLFRKSNLKPFERDISTEIYQAGSTPCNGVEGFNCYFPLQSYGFQPT
NGVGYQPYRVVVLSFELLHAPATVCGPKKSTNLVKNKCVNFNFNGLTGTG
VLTESNKKFLPFQQFGRDIADTTDAVRDPQTLEILDITPCSFGGVSVITP
GTNTSNQVAVLYQDVNCTEVPVAIHADQLTPTWRVYSTGSNVFQTRAGCL
IGAEHVNNSYECDIPIGAGICASYQTQTNSPRRARSVASQSIIAYTMSLG
AENSVAYSNNSIAIPTNFTISVTTEILPVSMTKTSVDCTMYICGDSTECS
NLLLQYGSFCTQLNRALTGIAVEQDKNTQEVFAQVKQIYKTPPIKDFGGF
NFSQILPDPSKPSKRSFIEDLLFNKVTLADAGFIKQYGDCLGDIAARDLI
CAQKFNGLTVLPPLLTDEMIAQYTSALLAGTITSGWTFGAGAALQIPFAM
QMAYRFNGIGVTQNVLYENQKLIANQFNSAIGKIQDSLSSGASALGKLQD
VVNQNAQALNTLVKQLSSNFGAISSVLNDiLSRLDKPEAEVQIDRLITGR
LQSLQTYVTQQLIRAAEI RASANLAATKMSECVLGQSKRVDFCG KGYH
LMSFPQSAPHGVVFLHVTYVPAQEKNFTTAPAICHDGKAHFPREGVFVSN
GTHWFVTQRNFYEPQIITTDNTFVSGNCDVVIGIVNNTVYDPLQPELDSF
KEELDKYFKNHTSPDVDLGDISGINASVVNIQKEIDRLNEVAKNLNESLI
DLQELGKYEQYIKWPWYIWLGFIAGLIAIVMVTIMLCCMTSCCSCLKGCC
SCGSCCKFDEDDSEPVLKGVKLHYT

[0151] SEQ ID NO 23: SEQ ID NO 1 + S943G + V987P

MFVFLVLLPLVSSQCVNLTTRTQLPPAYTNSFTRGVYYPDKVFRSSVLHS
TQDLFLPFFSNVTWFHAIHVSGTNGTKRFDNPVLPFNDGVYFASTEKSNI
IRGWIFGTTLDSKTQSLLIVNNATNVVIKVCEFQFCNDPFLGVYYHKNNK
SWMESEFRVYSSANNCTFEYVSQPFLMDLEGKQGNFKNLREFVFKNIDGY
FKIYSKHTPINLVRDLPQGFSALEPLVDLPIGINITRFQTLLALHRSYLT
PGDSSSGWTAGAAAYYVGYLQPRTFLLKYNENGTITDAVDCALDPLSETK
CTLKSFTVEKGIYQTSNFRVQPTESIVRFPNITNLCPFGEVFNATRFASV
YAWNRKRISNCVADYSVLYNSASFSTFKCYGVSPTKLNDLCFTNVYADSF
VIRGDEVRQIAPGQTGKIADYNYKLPDDFTGCVIAWNSNNLDSKVGGNYN
YLYRLFRKSNLKPFERDISTEIYQAGSTPCNGVEGFNCYFPLQSYGFQPT
NGVGYQPYRVVVLSFELLHAPATVCGPKKSTNLVKNKCVNFNFNGLTGTG
VLTESNKKFLPFQQFGRDIADTTDAVRDPQTLEILDITPCSFGGVSVITP
GTNTSNQVAVLYQDVNCTEVPVAIHADQLTPTWRVYSTGSNVFQTRAGCL
IGAEHVNNSYECDIPIGAGICASYQTQTNSPRRARSVASQSIIAYTMSLG
AENSVAYSNNSIAIPTNFTISVTTEILPVSMTKTSVDCTMYICGDSTECS
NLLLQYGSFCTQLNRALTGIAVEQDKNTQEVFAQVKQIYKTPPIKDFGGF
NFSQILPDPSKPSKRSFIEDLLFNKVTLADAGFIKQYGDCLGDIAARDLI
CAQKFNGLTVLPPLLTDEMIAQYTSALLAGTITSGWTFGAGAALQIPFAM
QMAYRFNGIGVTQNVLYENQKLIANQFNSAIGKIQDSLSSTAGALGKLQD
VVNQNAQALNTLVKQLSSNFGAISSVLNDILSRLDKPEAEVQIDRLITGR
LQSLQTYVTQQLIRAAEIRASANLAATKMSECVLGQSKRVDFCGKGYHLM
SFPQSAPHGVVFLHVTYVPAQEKNFTTAPAICHDGKAHFPREGVFVSNGT
HWFVTQRNFYEPQIITTDNTFVSGNCDVVIGIVNNTVYDPLQPELDSFKE
ELDKYFKNHTSPDVDLGDISGINASVVNIQKEIDRLNEVAKNLNESLIDL
QELGKYEQYIKWPWYIWLGFIAGLIAIVMVTIMLCCMTSCCSCLKGCCSC
GSCCKFDEDDSEPVLKGVKLHYT

[0152] SEQ ID NO 24: SEQ ID NO 1 + D614N + A892P + A942P + T941G + V987P

MFVFLVLLPLVSSQCVNLTTRTQLPPAYTNSFTRGVYYPDKVFRSSVLHS
TQDLFLPFFSNVTWFHAIHVSGTNGTKRFDNPVLPFNDGVYFASTEKSNI
IRGWIFGTTLDSKTQSLLIVNNATNVVIKVCEFQFCNDPFLGVYYHKNNK
SWMESEFRVYSSANNCTFEYVSQPFLMDLEGKQGNFKNLREFVFKNIDGY
FKIYSKHTPINLVRDLPQGFSALEPLVDLPIGINITRFQTLLALHRSYLT
PGDSSSGWTAGAAAYYVGYLQPRTFLLKYNENGTITDAVDCALDPLSETK
CTLKSFTVEKGIYQTSNFRVQPTESIVRFPNITNLCPFGEVFNATRFASV
YAWNRKRISNCVADYSVLYNSASFSTFKCYGVSPTKLNDLCFTNVYADSF
VIRGDEVRQIAPGQTGKIADYNYKLPDDFTGCVIAWNSNNLDSKVGGNYN
YLYRLFRKSNLKPFERDISTEIYQAGSTPCNGVEGFNCYFPLQSYGFQPT
NGVGYQPYRVVVLSFELLHAPATVCGPKKSTNLVKNKCVNFNFNGLTGTG
VLTESNKKFLPFQQFGRDIADTTDAVRDPQTLEILDITPCSFGGVSVITP
GTNTSNQVAVLYQNVNCTEVPVAIHADQLTPTWRVYSTGSNVFQTRAGCL
IGAEHVNNSYECDIPIGAGICASYQTQTNSPRRARSVASQSIIAYTMSLG
AENSVAYSNNSIAIPTNFTISVTTEILPVSMTKTSVDCTMYICGDSTECS
NLLLQYGSFCTQLNRALTGIAVEQDKNTQEVFAQVKQIYKTPPIKDFGGF
NFSQILPDPSKPSKRSFIEDLLFNKVTLADAGFIKQYGDCLGDIAARDLI
CAQKFNGLTVLPPLLTDEMIAQYTSALLAGTITSGWTFGAGPALQIPFAM
QMAYRFNGIGVTQNVLYENQKLIANQFNSAIGKIQDSLSSGPSALGKLQD
VVNQNAQALNTLVKQLSSNFGAISSVLNDILSRLDKPEAEVQIDRLITGR
LQSLQTYVTQQLIRAAEIRASANLAATKMSECVLGQSKRVDFCGKGYHLM
SFPQSAPHGVVFLHVTYVPAQEKNFTTAPAICHDGKAHFPREGVFVSNGT
HWFVTQRNFYEPQIITTDNTFVSGNCDVVIGIVNNTVYDPLQPELDSFKE
ELDKYFKNHTSPDVDLGDISGINASVVNIQKEIDRLNEVAKNLNESLIDL
QELGKYEQYIKWPWYIWLGFIAGLIAIVMVTIMLCCMTSCCSCLKGCCSC
GSCCKFDEDDSEPVLKGVKLHYT

[0153] SEQ ID NO 25: SEQ ID NO 1 + D614N + A892P + A942P + S943G + V987P

MFVFLVLLPLVSSQCVNLTTRTQLPPAYTNSFTRGVYYPDKVFRSSVLHS
TQDLFLPFFSNVTWFHAIHVSGTNGTKRFDNPVLPFNDGVYFASTEKSNI
IRGWIFGTTLDSKTQSLLIVNNATNVVIKVCEFQFCNDPFLGVYYHKNNK
SWMESEFRVYSSANNCTFEYVSQPFLMDLEGKQGNFKNLREFVFKNIDGY
FKIYSKHTPINLVRDLPQGFSALEPLVDLPIGINITRFQTLLALHRSYLT
PGDSSSGWTAGAAAYYVGYLQPRTFLLKYNENGTITDAVDCALDPLSETK
CTLKSFTVEKGIYQTSNFRVQPTESIVRFPNITNLCPFGEVFNATRFASV
YAWNRKRISNCVADYSVLYNSASFSTFKCYGVSPTKLNDLCFTNVYADSF
VIRGDEVRQIAPGQTGKIADYNYKLPDDFTGCVIAWNSNNLDSKVGGNYN
YLYRLFRKSNLKPFERDISTEIYQAGSTPCNGVEGFNCYFPLQSYGFQPT
NGVGYQPYRVVVLSFELLHAPATVCGPKKSTNLVKNKCVNFNFNGLTGTG
VLTESNKKFLPFQQFGRDIADTTDAVRDPQTLEILDITPCSFGGVSVITP
GTNTSNQVAVLYQNVNCTEVPVAIHADQLTPTWRVYSTGSNVFQTRAGCL
IGAEHVNNSYECDIPIGAGICASYQTQTNSPRRARSVASQSIIAYTMSLG
AENSVAYSNNSIAIPTNFTISVTTEILPVSMTKTSVDCTMYICGDSTECS
NLLLQYGSFCTQLNRALTGIAVEQDKNTQEVFAQVKQIYKTPPIKDFGGF
NFSQILPDPSKPSKRSFIEDLLFNKVTLADAGFIKQYGDCLGDIAARDLI
CAQKFNGLTVLPPLLTDEMIAQYTSALLAGTITSGWTFGAGPALQIPFAM
QMAYRFNGIGVTQNVLYENQKLIANQFNSAIGKIQDSLSSTPGALGKLQD
VVNQNAQALNTLVKQLSSNFGAISSVLNDILSRLDKPEAEVQIDRLITGR
LQSLQTYVTQQLIRAAEIRASANLAATKMSECVLGQSKRVDFCGKGYHLM
SFPQSAPHGVVFLHVTYVPAQEKNFTTAPAICHDGKAHFPREGVFVSNGT
HWFVTQRNFYEPQIITTDNTFVSGNCDVVIGIVNNTVYDPLQPELDSFKE
ELDKYFKNHTSPDVDLGDISGINASVVNIQKEIDRLNEVAKNLNESLIDL
QELGKYEQYIKWPWYIWLGFIAGLIAIVMVTIMLCCMTSCCSCLKGCCSC
GSCCKFDEDDSEPVLKGVKLHYT

[0154] SEQ ID NO 26: SEQ ID NO 1 + D614N + A892P + A942P + T941G + S943G + V987P

MFVFLVLLPLVSSQCVNLTTRTQLPPAYTNSFTRGVYYPDKVFRSSVLHS
TQDLFLPFFSNVTWFHAIHVSGTNGTKRFDNPVLPFNDGVYFASTEKSNI
IRGWIFGTTLDSKTQSLLIVNNATNVVIKVCEFQFCNDPFLGVYYHKNNK
SWMESEFRVYSSANNCTFEYVSQPFLMDLEGKQGNFKNLREFVFKNIDGY
FKIYSKHTPINLVRDLPQGFSALEPLVDLPIGINITRFQTLLALHRSYLT
PGDSSSGWTAGAAAYYVGYLQPRTFLLKYNENGTITDAVDCALDPLSETK
CTLKSFTVEKGIYQTSNFRVQPTESIVRFPNITNLCPFGEVFNATRFASV
YAWNRKRISNCVADYSVLYNSASFSTFKCYGVSPTKLNDLCFTNVYADSF
VIRGDEVRQIAPGQTGKIADYNYKLPDDFTGCVIAWNSNNLDSKVGGNYN
YLYRLFRKSNLKPFERDISTEIYQAGSTPCNGVEGFNCYFPLQSYGFQPT
NGVGYQPYRVVVLSFELLHAPATVCGPKKSTNLVKNKCVNFNFNGLTGTG
VLTESNKKFLPFQQFGRDIADTTDAVRDPQTLEILDITPCSFGGVSVITP
GTNTSNQVAVLYQNVNCTEVPVAIHADQLTPTWRVYSTGSNVFQTRAGCL
IGAEHVNNSYECDIPIGAGICASYQTQTNSPRRARSVASQSIIAYTMSLG
AENSVAYSNNSIAIPTNFTISVTTEILPVSMTKTSVDCTMYICGDSTECS
NLLLQYGSFCTQLNRALTGIAVEQDKNTQEVFAQVKQIYKTPPIKDFGGF
NFSQILPDPSKPSKRSFIEDLLFNKVTLADAGFIKQYGDCLGDIAARDLI
CAQKFNGLTVLPPLLTDEMIAQYTSALLAGTITSGWTFGAGPALQIPFAM
QMAYRFNGIGVTQNVLYENQKLIANQFNSAIGKIQDSLSSGPGALGKLQD
VVNQNAQALNTLVKQLSSNFGAISSVLNDILSRLDKPEAEVQIDRLlTGR
LQSLQTYVTQQLIRAAEI RASANLAATKMSECVLGQSKRVDFCG KGYH
LMSFPQSAPHGVVFLHVTYVPAQEKNFTTAPAICHDGKAHFPREGVFVSN
GTHWFVTQRNFYEPQIITTDNTFVSGNCDVVIGIVNNTVYDPLQPELDSF
KEELDKYFKNHTSPDVDLGDISGINASVVNIQKEIDRLNEVAKNLNESLI
DLQELGKYEQYIKWPWYIWLGFIAGLIAIVMVTIMLCCMTSCCSCLKGCC
SCGSCCKFDEDDSEPVLKGVKLHYT

[0155] SEQ ID NO 27: SEQ ID NO 1 + D614N + A892P + A942P + T941G + A944P + V987P

MFVFLVLLPLVSSQCVNLTTRTQLPPAYTNSFTRGVYYPDKVFRSSVLHS
TQDLFLPFFSNVTWFHAIHVSGTNGTKRFDNPVLPFNDGVYFASTEKSNI
IRGWIFGTTLDSKTQSLLIVNNATNVVIKVCEFQFCNDPFLGVYYHKNNK
SWMESEFRVYSSANNCTFEYVSQPFLMDLEGKQGNFKNLREFVFKNIDGY
FKIYSKHTPINLVRDLPQGFSALEPLVDLPIGINITRFQTLLALHRSYLT
PGDSSSGWTAGAAAYYVGYLQPRTFLLKYNENGTITDAVDCALDPLSETK
CTLKSFTVEKGIYQTSNFRVQPTESIVRFPNITNLCPFGEVFNATRFASV
YAWNRKRISNCVADYSVLYNSASFSTFKCYGVSPTKLNDLCFTNVYADSF
VIRGDEVRQIAPGQTGKIADYNYKLPDDFTGCVIAWNSNNLDSKVGGNYN
YLYRLFRKSNLKPFERDISTEIYQAGSTPCNGVEGFNCYFPLQSYGFQPT
NGVGYQPYRVVVLSFELLHAPATVCGPKKSTNLVKNKCVNFNFNGLTGTG
VLTESNKKFLPFQQFGRDIADTTDAVRDPQTLEILDITPCSFGGVSVITP
GTNTSNQVAVLYQNVNCTEVPVAIHADQLTPTWRVYSTGSNVFQTRAGCL
IGAEHVNNSYECDIPIGAGICASYQTQTNSPRRARSVASQSIIAYTMSLG
AENSVAYSNNSIAIPTNFTISVTTEILPVSMTKTSVDCTMYICGDSTECS
NLLLQYGSFCTQLNRALTGIAVEQDKNTQEVFAQVKQIYKTPPIKDFGGF
NFSQILPDPSKPSKRSFIEDLLFNKVTLADAGFIKQYGDCLGDIAARDLI
CAQKFNGLTVLPPLLTDEMIAQYTSALLAGTITSGWTFGAGPALQIPFAM
QMAYRFNGIGVTQNVLYENQKLIANQFNSAIGKIQDSLSSGPSPLGKLQD
VVNQNAQALNTLVKQLSSNFGAISSVLNDILSRLDKPEAEVQIDRLITGR
LQSLQTYVTQQLIRAAEIRASANLAATKMSECVLGQSKRVDFCGKGYHLM
SFPQSAPHGVVFLHVTYVPAQEKNFTTAPAICHDGKAHFPREGVFVSNGT
HWFVTQRNFYEPQIITTDNTFVSGNCDVVIGIVNNTVYDPLQPELDSFKE
ELDKYFKNHTSPDVDLGDISGINASVVNIQKEIDRLNEVAKNLNESLIDL
QELGKYEQYIKWPWYIWLGFIAGLIAIVMVTIMLCCMTSCCSCLKGCCSC
GSCCKFDEDDSEPVLKGVKLHYT

[0156] SEQ ID NO 28: SEQ ID NO 1 + D614N + A892P + A942P + S943G + A944P + V987P

MFVFLVLLPLVSSQCVNLTTRTQLPPAYTNSFTRGVYYPDKVFRSSVLHS
TQDLFLPFFSNVTWFHAIHVSGTNGTKRFDNPVLPFNDGVYFASTEKSNI
IRGWIFGTTLDSKTQSLLIVNNATNVVIKVCEFQFCNDPFLGVYYHKNNK
SWMESEFRVYSSANNCTFEYVSQPFLMDLEGKQGNFKNLREFVFKNIDGY
FKIYSKHTPINLVRDLPQGFSALEPLVDLPIGINITRFQTLLALHRSYLT
PGDSSSGWTAGAAAYYVGYLQPRTFLLKYNENGTITDAVDCALDPLSETK
CTLKSFTVEKGIYQTSNFRVQPTESIVRFPNITNLCPFGEVFNATRFASV
YAWNRKRISNCVADYSVLYNSASFSTFKCYGVSPTKLNDLCFTNVYADSF
VIRGDEVRQIAPGQTGKIADYNYKLPDDFTGCVIAWNSNNLDSKVGGNYN
YLYRLFRKSNLKPFERDISTEIYQAGSTPCNGVEGFNCYFPLQSYGFQPT
NGVGYQPYRVVVLSFELLHAPATVCGPKKSTNLVKNKCVNFNFNGLTGTG
VLTESNKKFLPFQQFGRDIADTTDAVRDPQTLEILDITPCSFGGVSVITP
GTNTSNQVAVLYQNVNCTEVPVAIHADQLTPTWRVYSTGSNVFQTRAGCL
IGAEHVNNSYECDIPIGAGICASYQTQTNSPRRARSVASQSIIAYTMSLG
AENSVAYSNNSIAIPTNFTISVTTEILPVSMTKTSVDCTMYICGDSTECS
NLLLQYGSFCTQLNRALTGIAVEQDKNTQEVFAQVKQIYKTPPIKDFGGF
NFSQILPDPSKPSKRSFIEDLLFNKVTLADAGFIKQYGDCLGDIAARDLI
CAQKFNGLTVLPPLLTDEMIAQYTSALLAGTITSGWTFGAGPALQIPFAM
QMAYRFNGIGVTQNVLYENQKLIANQFNSAIGKIQDSLSSTPGPLGKLQD
VVNQNAQALNTLVKQLSSNFGAISSVLNDILSRLDKPEAEVQIDRLITGR
LQSLQTYVTQQLIRAAEIRASANLAATKMSECVLGQSKRVDFCGKGYHLM
SFPQSAPHGVVFLHVTYVPAQEKNFTTAPAICHDGKAHFPREGVFVSNGT
HWFVTQRNFYEPQIITTDNTFVSGNCDVVIGIVNNTVYDPLQPELDSFKE
ELDKYFKNHTSPDVDLGDISGINASVVNIQKEIDRLNEVAKNLNESLIDL
QELGKYEQYIKWPWYIWLGFIAGLIAIVMVTIMLCCMTSCCSCLKGCCSC
GSCCKFDEDDSEPVLKGVKLHYT

[0157] SEQ ID NO 29: SEQ ID NO 1 + T941G + K986P + V987P

MFVFLVLLPLVSSQCVNLTTRTQLPPAYTNSFTRGVYYPDKVFRSSVLHS
TQDLFLPFFSNVTWFHAIHVSGTNGTKRFDNPVLPFNDGVYFASTEKSNI
IRGWIFGTTLDSKTQSLLIVNNATNVVIKVCEFQFCNDPFLGVYYHKNNK
SWMESEFRVYSSANNCTFEYVSQPFLMDLEGKQGNFKNLREFVFKNIDGY
FKIYSKHTPINLVRDLPQGFSALEPLVDLPIGINITRFQTLLALHRSYLT
PGDSSSGWTAGAAAYYVGYLQPRTFLLKYNENGTITDAVDCALDPLSETK
CTLKSFTVEKGIYQTSNFRVQPTESIVRFPNITNLCPFGEVFNATRFASV
YAWNRKRISNCVADYSVLYNSASFSTFKCYGVSPTKLNDLCFTNVYADSF
VIRGDEVRQIAPGQTGKIADYNYKLPDDFTGCVIAWNSNNLDSKVGGNYN
YLYRLFRKSNLKPFERDISTEIYQAGSTPCNGVEGFNCYFPLQSYGFQPT
NGVGYQPYRVVVLSFELLHAPATVCGPKKSTNLVKNKCVNFNFNGLTGTG
VLTESNKKFLPFQQFGRDIADTTDAVRDPQTLEILDITPCSFGGVSVITP
GTNTSNQVAVLYQDVNCTEVPVAIHADQLTPTWRVYSTGSNVFQTRAGCL
IGAEHVNNSYECDIPIGAGICASYQTQTNSPRRARSVASQSIIAYTMSLG
AENSVAYSNNSIAIPTNFTISVTTEILPVSMTKTSVDCTMYICGDSTECS
NLLLQYGSFCTQLNRALTGIAVEQDKNTQEVFAQVKQIYKTPPIKDFGGF
NFSQILPDPSKPSKRSFIEDLLFNKVTLADAGFIKQYGDCLGDIAARDLI
CAQKFNGLTVLPPLLTDEMIAQYTSALLAGTITSGWTFGAGAALQIPFAM
QMAYRFNGIGVTQNVLYENQKLIANQFNSAIGKIQDSLSSGASALGKLQD
VVNQNAQALNTLVKQLSSNFGAISSVLNDILSRLDPPEAEVQIDRLITGR
LQSLQTYVTQQLIRAAEIRASANLAATKMSECVLGQSKRVDFCGKGYHLM
SFPQSAPHGVVFLHVTYVPAQEKNFTTAPAICHDGKAHFPREGVFVSNGT
HWFVTQRNFYEPQIITTDNTFVSGNCDVVIGIVNNTVYDPLQPELDSFKE
ELDKYFKNHTSPDVDLGDISGINASVVNIQKEIDRLNEVAKNLNESLIDL
QELGKYEQYIKWPWYIWLGFIAGLIAIVMVTIMLCCMTSCCSCLKGCCSC
GSCCKFDEDDSEPVLKGVKLHYT

[0158] SEQ ID NO 30: SEQ ID NO 1 + S943G + K986P + V987P

MFVFLVLLPLVSSQCVNLTTRTQLPPAYTNSFTRGVYYPDKVFRSSVLHS
TQDLFLPFFSNVTWFHAIHVSGTNGTKRFDNPVLPFNDGVYFASTEKSNI
IRGWIFGTTLDSKTQSLLIVNNATNVVIKVCEFQFCNDPFLGVYYHKNNK
SWMESEFRVYSSANNCTFEYVSQPFLMDLEGKQGNFKNLREFVFKNIDGY
FKIYSKHTPINLVRDLPQGFSALEPLVDLPIGINITRFQTLLALHRSYLT
PGDSSSGWTAGAAAYYVGYLQPRTFLLKYNENGTITDAVDCALDPLSETK
CTLKSFTVEKGIYQTSNFRVQPTESIVRFPNITNLCPFGEVFNATRFASV
YAWNRKRISNCVADYSVLYNSASFSTFKCYGVSPTKLNDLCFTNVYADSF
VIRGDEVRQIAPGQTGKIADYNYKLPDDFTGCVIAWNSNNLDSKVGGNYN
YLYRLFRKSNLKPFERDISTEIYQAGSTPCNGVEGFNCYFPLQSYGFQPT
NGVGYQPYRVVVLSFELLHAPATVCGPKKSTNLVKNKCVNFNFNGLTGTG
VLTESNKKFLPFQQFGRDIADTTDAVRDPQTLEILDITPCSFGGVSVITP
GTNTSNQVAVLYQDVNCTEVPVAIHADQLTPTWRVYSTGSNVFQTRAGCL
IGAEHVNNSYECDIPIGAGICASYQTQTNSPRRARSVASQSIIAYTMSLG
AENSVAYSNNSIAIPTNFTISVTTEILPVSMTKTSVDCTMYICGDSTECS
NLLLQYGSFCTQLNRALTGIAVEQDKNTQEVFAQVKQIYKTPPIKDFGGF
NFSQILPDPSKPSKRSFIEDLLFNKVTLADAGFIKQYGDCLGDIAARDLI
CAQKFNGLTVLPPLLTDEMIAQYTSALLAGTITSGWTFGAGAALQIPFAM
QMAYRFNGIGVTQNVLYENQKLIANQFNSAIGKIQDSLSSTAGALGKLQD
VVNQNAQALNTLVKQLSSNFGAISSVLNDILSRLDPPEAEVQIDRLITGR
LQSLQTYVTQQLIRAAEIRASANLAATKMSECVLGQSKRVDFCGKGYHLM
SFPQSAPHGVVFLHVTYVPAQEKNFTTAPAICHDGKAHFPREGVFVSNGT
HWFVTQRNFYEPQIITTDNTFVSGNCDVVIGIVNNTVYDPLQPELDSFKE
ELDKYFKNHTSPDVDLGDISGINASVVNIQKEIDRLNEVAKNLNESLIDL
QELGKYEQYIKWPWYIWLGFIAGLIAIVMVTIMLCCMTSCCSCLKGCCSC
GSCCKFDEDDSEPVLKGVKLHYT

[0159] SEQ ID NO 31: SEQ ID NO 1 + D614N + A892P + A942P + T941G + K986P + V987P

MFVFLVLLPLVSSQCVNLTTRTQLPPAYTNSFTRGVYYPDKVFRSSVLHS
TQDLFLPFFSNVTWFHAIHVSGTNGTKRFDNPVLPFNDGVYFASTEKSNI
IRGWIFGTTLDSKTQSLLIVNNATNVVIKVCEFQFCNDPFLGVYYHKNNK
SWMESEFRVYSSANNCTFEYVSQPFLMDLEGKQGNFKNLREFVFKNIDGY
FKIYSKHTPINLVRDLPQGFSALEPLVDLPIGINITRFQTLLALHRSYLT
PGDSSSGWTAGAAAYYVGYLQPRTFLLKYNENGTITDAVDCALDPLSETK
CTLKSFTVEKGIYQTSNFRVQPTESIVRFPNITNLCPFGEVFNATRFASV
YAWNRKRISNCVADYSVLYNSASFSTFKCYGVSPTKLNDLCFTNVYADSF
VIRGDEVRQIAPGQTGKIADYNYKLPDDFTGCVIAWNSNNLDSKVGGNYN
YLYRLFRKSNLKPFERDISTEIYQAGSTPCNGVEGFNCYFPLQSYGFQPT
NGVGYQPYRVVVLSFELLHAPATVCGPKKSTNLVKNKCVNFNFNGLTGTG
VLTESNKKFLPFQQFGRDIADTTDAVRDPQTLEILDITPCSFGGVSVITP
GTNTSNQVAVLYQNVNCTEVPVAIHADQLTPTWRVYSTGSNVFQTRAGCL
IGAEHVNNSYECDIPIGAGICASYQTQTNSPRRARSVASQSIIAYTMSLG
AENSVAYSNNSIAIPTNFTISVTTEILPVSMTKTSVDCTMYICGDSTECS
NLLLQYGSFCTQLNRALTGIAVEQDKNTQEVFAQVKQIYKTPPIKDFGGF
NFSQILPDPSKPSKRSFIEDLLFNKVTLADAGFIKQYGDCLGDIAARDLI
CAQKFNGLTVLPPLLTDEMIAQYTSALLAGTITSGWTFGAGPALQIPFAM
QMAYRFNGIGVTQNVLYENQKLIANQFNSAIGKIQDSLSSGPSALGKLQD
VVNQNAQALNTLVKQLSSNFGAISSVLNDILSRLDPPEAEVQIDRLITGR
LQSLQTYVTQQLIRAAEIRASANLAATKMSECVLGQSKRVDFCGKGYHLM
SFPQSAPHGVVFLHVTYVPAQEKNFTTAPAICHDGKAHFPREGVFVSNGT
HWFVTQRNFYEPQIITTDNTFVSGNCDVVIGIVNNTVYDPLQPELDSFKE
ELDKYFKNHTSPDVDLGDISGINASVVNIQKEIDRLNEVAKNLNESLIDL
QELGKYEQYIKWPWYIWLGFIAGLIAIVMVTIMLCCMTSCCSCLKGCCSC
GSCCKFDEDDSEPVLKGVKLHYT

[0160] SEQ ID NO 32: SEQ ID NO 1 + D614N + A892P + A942P + S943G + K986P + V987P

MFVFLVLLPLVSSQCVNLTTRTQLPPAYTNSFTRGVYYPDKVFRSSVLHS
TQDLFLPFFSNVTWFHAIHVSGTNGTKRFDNPVLPFNDGVYFASTEKSNI
IRGWIFGTTLDSKTQSLLIVNNATNVVIKVCEFQFCNDPFLGVYYHKNNK
SWMESEFRVYSSANNCTFEYVSQPFLMDLEGKQGNFKNLREFVFKNIDGY
FKIYSKHTPINLVRDLPQGFSALEPLVDLPIGINITRFQTLLALHRSYLT
PGDSSSGWTAGAAAYYVGYLQPRTFLLKYNENGTITDAVDCALDPLSETK
CTLKSFTVEKGIYQTSNFRVQPTESIVRFPNITNLCPFGEVFNATRFASV
YAWNRKRISNCVADYSVLYNSASFSTFKCYGVSPTKLNDLCFTNVYADSF
VIRGDEVRQIAPGQTGKIADYNYKLPDDFTGCVIAWNSNNLDSKVGGNYN
YLYRLFRKSNLKPFERDISTEIYQAGSTPCNGVEGFNCYFPLQSYGFQPT
NGVGYQPYRVVVLSFELLHAPATVCGPKKSTNLVKNKCVNFNFNGLTGTG
VLTESNKKFLPFQQFGRDIADTTDAVRDPQTLEILDITPCSFGGVSVITP
GTNTSNQVAVLYQNVNCTEVPVAIHADQLTPTWRVYSTGSNVFQTRAGCL
IGAEHVNNSYECDIPIGAGICASYQTQTNSPRRARSVASQSIIAYTMSLG
AENSVAYSNNSIAIPTNFTISVTTEILPVSMTKTSVDCTMYICGDSTECS
NLLLQYGSFCTQLNRALTGIAVEQDKNTQEVFAQVKQIYKTPPIKDFGGF
NFSQILPDPSKPSKRSFIEDLLFNKVTLADAGFIKQYGDCLGDIAARDLI
CAQKFNGLTVLPPLLTDEMIAQYTSALLAGTITSGWTFGAGPALQIPFAM
QMAYRFNGIGVTQNVLYENQKLIANQFNSAIGKIQDSLSSTPGALGKLQD
VVNQNAQALNTLVKQLSSNFGAISSVLNDILSRLDPPEAEVQIDRLITGR
LQSLQTYVTQQLIRAAEIRASANLAATKMSECVLGQSKRVDFCGKGYHLM
SFPQSAPHGVVFLHVTYVPAQEKNFTTAPAICHDGKAHFPREGVFVSNGT
HWFVTQRNFYEPQIITTDNTFVSGNCDVVIGIVNNTVYDPLQPELDSFKE
ELDKYFKNHTSPDVDLGDISGINASVVNIQKEIDRLNEVAKNLNESLIDL
QELGKYEQYIKWPWYIWLGFIAGLIAIVMVTIMLCCMTSCCSCLKGCCSC
GSCCKFDEDDSEPVLKGVKLHYT

[0161] SEQ ID NO 33: SEQ ID NO 1 + D614N + A892P + A942P + T941G + S943G + K986P + V987P

MFVFLVLLPLVSSQCVNLTTRTQLPPAYTNSFTRGVYYPDKVFRSSVLHS
TQDLFLPFFSNVTWFHAIHVSGTNGTKRFDNPVLPFNDGVYFASTEKSNI
IRGWIFGTTLDSKTQSLLIVNNATNVVIKVCEFQFCNDPFLGVYYHKNNK
SWMESEFRVYSSANNCTFEYVSQPFLMDLEGKQGNFKNLREFVFKNIDGY
FKIYSKHTPINLVRDLPQGFSALEPLVDLPIGINITRFQTLLALHRSYLT
PGDSSSGWTAGAAAYYVGYLQPRTFLLKYNENGTITDAVDCALDPLSETK
CTLKSFTVEKGIYQTSNFRVQPTESIVRFPNITNLCPFGEVFNATRFASV
YAWNRKRISNCVADYSVLYNSASFSTFKCYGVSPTKLNDLCFTNVYADSF
VIRGDEVRQIAPGQTGKIADYNYKLPDDFTGCVIAWNSNNLDSKVGGNYN
YLYRLFRKSNLKPFERDISTEIYQAGSTPCNGVEGFNCYFPLQSYGFQPT
NGVGYQPYRVVVLSFELLHAPATVCGPKKSTNLVKNKCVNFNFNGLTGTG
VLTESNKKFLPFQQFGRDIADTTDAVRDPQTLEILDITPCSFGGVSVITP
GTNTSNQVAVLYQNVNCTEVPVAIHADQLTPTWRVYSTGSNVFQTRAGCL
IGAEHVNNSYECDIPIGAGICASYQTQTNSPRRARSVASQSIIAYTMSLG
AENSVAYSNNSIAIPTNFTISVTTEILPVSMTKTSVDCTMYICGDSTECS
NLLLQYGSFCTQLNRALTGIAVEQDKNTQEVFAQVKQIYKTPPIKDFGGF
NFSQILPDPSKPSKRSFIEDLLFNKVTLADAGFIKQYGDCLGDIAARDLI
CAQKFNGLTVLPPLLTDEMIAQYTSALLAGTITSGWTFGAGPALQIPFAM
QMAYRFNGIGVTQNVLYENQKLIANQFNSAIGKIQDSLSSGPGALGKLQD
VVNQNAQALNTLVKQLSSNFGAISSVLNDILSRLDPPEAEVQIDRLITGR
LQSLQTYVTQQLIRAAEIRASANLAATKMSECVLGQSKRVDFCGKGYHLM
SFPQSAPHGVVFLHVTYVPAQEKNFTTAPAICHDGKAHFPREGVFVSNGT
HWFVTQRNFYEPQIITTDNTFVSGNCDVVIGIVNNTVYDPLQPELDSFKE
ELDKYFKNHTSPDVDLGDISGINASVVNIQKEIDRLNEVAKNLNESLIDL
QELGKYEQYIKWPWYIWLGFIAGLIAIVMVTIMLCCMTSCCSCLKGCCSC
GSCCKFDEDDSEPVLKGVKLHYT

[0162] SEQ ID NO 34: SEQ ID NO 1 + D614N + A892P + A942P + T941G + A944P + K986P + V987P

MFVFLVLLPLVSSQCVNLTTRTQLPPAYTNSFTRGVYYPDKVFRSSVLHS
TQDLFLPFFSNVTWFHAIHVSGTNGTKRFDNPVLPFNDGVYFASTEKSNI
IRGWIFGTTLDSKTQSLLIVNNATNVVIKVCEFQFCNDPFLGVYYHKNNK
SWMESEFRVYSSANNCTFEYVSQPFLMDLEGKQGNFKNLREFVFKNIDGY
FKIYSKHTPINLVRDLPQGFSALEPLVDLPIGINITRFQTLLALHRSYLT
PGDSSSGWTAGAAAYYVGYLQPRTFLLKYNENGTITDAVDCALDPLSETK
CTLKSFTVEKGIYQTSNFRVQPTESIVRFPNITNLCPFGEVFNATRFASV
YAWNRKRISNCVADYSVLYNSASFSTFKCYGVSPTKLNDLCFTNVYADSF
VIRGDEVRQIAPGQTGKIADYNYKLPDDFTGCVIAWNSNNLDSKVGGNYN
YLYRLFRKSNLKPFERDISTEIYQAGSTPCNGVEGFNCYFPLQSYGFQPT
NGVGYQPYRVVVLSFELLHAPATVCGPKKSTNLVKNKCVNFNFNGLTGTG
VLTESNKKFLPFQQFGRDIADTTDAVRDPQTLEILDITPCSFGGVSVITP
GTNTSNQVAVLYQNVNCTEVPVAIHADQLTPTWRVYSTGSNVFQTRAGCL
IGAEHVNNSYECDIPIGAGICASYQTQTNSPRRARSVASQSIIAYTMSLG
AENSVAYSNNSIAIPTNFTISVTTEILPVSMTKTSVDCTMYICGDSTECS
NLLLQYGSFCTQLNRALTGIAVEQDKNTQEVFAQVKQIYKTPPIKDFGGF
NFSQILPDPSKPSKRSFIEDLLFNKVTLADAGFIKQYGDCLGDIAARDLI
CAQKFNGLTVLPPLLTDEMIAQYTSALLAGTITSGWTFGAGPALQIPFAM
QMAYRFNGIGVTQNVLYENQKLIANQFNSAIGKIQDSLSSGPSPLGKLQD
VVNQNAQALNTLVKQLSSNFGAISSVLNDILSRLDPPEAEVQIDRLITGR
LQSLQTYVTQQLIRAAEIRASANLAATKMSECVLGQSKRVDFCGKGYHLM
SFPQSAPHGVVFLHVTYVPAQEKNFTTAPAICHDGKAHFPREGVFVSNGT
HWFVTQRNFYEPQIITTDNTFVSGNCDVVIGIVNNTVYDPLQPELDSFKE
ELDKYFKNHTSPDVDLGDISGINASVVNIQKEIDRLNEVAKNLNESLIDL
QELGKYEQYIKWPWYIWLGFIAGLIAIVMVTIMLCCMTSCCSCLKGCCSC
GSCCKFDEDDSEPVLKGVKLHYT

[0163] SEQ ID NO 35: SEQ ID NO 1 + D614N + A892P + A942P + S943G + A944P + K986P + V987P

MFVFLVLLPLVSSQCVNLTTRTQLPPAYTNSFTRGVYYPDKVFRSSVLHS
TQDLFLPFFSNVTWFHAIHVSGTNGTKRFDNPVLPFNDGVYFASTEKSNI
IRGWIFGTTLDSKTQSLLIVNNATNVVIKVCEFQFCNDPFLGVYYHKNNK
SWMESEFRVYSSANNCTFEYVSQQPFLMDLEGKQGNFKNLREFVFKNIDG
YFKIYSKHTPINLVRDLPQGFSALEPLVDLPIGINITRFQTLLALHRSYL
TPGDSSSGWTAGAAAYYVGYLQPRTFLLKYNENGTITDAVDCALDPLSET
KCTLKSFTVEKGIYQTSNFRVQPTESIVRFPNITNLCPFGEVFNATRFAS
VYAWNRKRISNCVADYSVLYNSASFSTFKCYGVSPTKLNDLCFTNVYADS
FVIRGDEVRQIAPGQTGKIADYNYKLPDDFTGCVIAWNSNNLDSKVGGNY
NYLYRLFRKSNLKPFERDISTEIYQAGSTPCNGVEGFNCYFPLQSYGFQP
TNGVGYQPYRVVVLSFELLHAPATVCGPKKSTNLVKNKCVNFNFNGLTGT
GVLTESNKKFLPFQQFGRDIADTTDAVRDPQTLEILDITPCSFGGVSVIT
PGTNTSNQVAVLYQNVNCTEVPVAIHADQLTPTWRVYSTGSNVFQTRAGC
LIGAEHVNNSYECDIPIGAGICASYQTQTNSPRRARSVASQSIIAYTMSL
GAENSVAYSNNSIAIPTNFTISVTTEILPVSMTKTSVDCTMYICGDSTEC
SNLLLQYGSFCTQLNRALTGIAVEQDKNTQEVFAQVKQIYKTPPIKDFGG
FNFSQILPDPSKPSKRSFIEDLLFNKVTLADAGFIKQYGDCLGDIAARDL
ICAQKFNGLTVLPPLLTDEMIAQYTSALLAGTITSGWTFGAGPALQIPFA
MQMAYRFNGIGVTQNVLYENQKLIANQFNSAIGKIQDSLSSTPGPLGKLQ
DVVNQNAQALNTLVKQLSSNFGAISSVLNDILSRLDPPEAEVQIDRLITG
RLQSLQTYVTQQLIRAAEIRASANLAATKMSECVLGQSKRVDFCGKGYHL
MSFPQSAPHGVVFLHVTYVPAQEKNFTTAPAICHDGKAHFPREGVFVSNG
THWFVTQRNFYEPQIITTDNTFVSGNCDVVIGIVNNTVYDPLQPELDSFK
EELDKYFKNHTSPDVDLGDISGINASVVNIQKEIDRLNEVAKNLNESLID
LQELGKYEQYIKWPWYIWLGFIAGLIAIVMVTIMLCCMTSCCSCLKGCCS
CGSCCKFDEDDSEPVLKGVKLHYT

[0164] SEQ ID NO 36: SEQ ID NO 6 + T941G

MFVFLVLLPLVSSQCVNLTTRTQLPPAYTNSFTRGVYYPDKVFRSSVLHS
TQDLFLPFFSNVTWFHAIHVSGTNGTKRFDNPVLPFNDGVYFASTEKSNI
IRGWIFGTTLDSKTQSLLIVNNATNVVIKVCEFQFCNDPFLGVYYHKNNK
SWMESEFRVYSSANNCTFEYVSQPFLMDLEGKQGNFKNLREFVFKNIDGY
FKIYSKHTPINLVRDLPQGFSALEPLVDLPIGINITRFQTLLALHRSYLT
PGDSSSGWTAGAAAYYVGYLQPRTFLLKYNENGTITDAVDCALDPLSETK
CTLKSFTVEKGIYQTSNFRVQPTESIVRFPNITNLCPFGEVFNATRFASV
YAWNRKRISNCVADYSVLYNSASFSTFKCYGVSPTKLNDLCFTNVYADSF
VIRGDEVRQIAPGQTGKIADYNYKLPDDFTGCVIAWNSNNLDSKVGGNYN
YLYRLFRKSNLKPFERDISTEIYQAGSTPCNGVEGFNCYFPLQSYGFQPT
NGVGYQPYRVVVLSFELLHAPATVCGPKKSTNLVKNKCVNFNFNGLTGTG
VLTESNKKFLPFQQFGRDIADTTDAVRDPQTLEILDITPCSFGGVSVITP
GTNTSNQVAVLYQDVNCTEVPVAIHADQLTPTWRVYSTGSNVFQTRAGCL
IGAEHVNNSYECDIPIGAGICASYQTQTNSPSRAGSVASQSIIAYTMSLG
AENSVAYSNNSIAIPTNFTISVTTEILPVSMTKTSVDCTMYICGDSTECS
NLLLQYGSFCTQLNRALTGIAVEQDKNTQEVFAQVKQIYKTPPIKDFGGF
NFSQILPDPSKPSKRSFIEDLLFNKVTLADAGFIKQYGDCLGDIAARDLI
CAQKFNGLTVLPPLLTDEMIAQYTSALLAGTITSGWTFGAGAALQIPFAM
QMAYRFNGIGVTQNVLYENQKLIANQFNSAIGKIQDSLSSGASALGKLQD
VVNQNAQALNTLVKQLSSNFGAISSVLNDILSRLDKVEAEVQIDRLITGR
LQSLQTYVTQQLIRAAEIRASANLAATKMSECVLGQSKRVDFCGKGYHLM
SFPQSAPHGVVFLHVTYVPAQEKNFTTAPAICHDGKAHFPREGVFVSNGT
HWFVTQRNFYEPQIITTDNTFVSGNCDVVIGIVNNTVYDPLQPELDSFKE
ELDKYFKNHTSPDVDLGDISGINASVVNIQKEIDRLNEVAKNLNESLIDL
QELGKYEQYIKWPWYIWLGFIAGLIAIVMVTIMLCCMTSCCSCLKGCCSC
GSCCKFDEDDSEPVLKGVKLHYT

[0165] SEQ ID NO 37: SEQ ID NO 6 + S943G

MFVFLVLLPLVSSQCVNLTTRTQLPPAYTNSFTRGVYYPDKVFRSSVLHS
TQDLFLPFFSNVTWFHAIHVSGTNGTKRFDNPVLPFNDGVYFASTEKSNI
IRGWIFGTTLDSKTQSLLIVNNATNVVIKVCEFQFCNDPFLGVYYHKNNK
SWMESEFRVYSSANNCTFEYVSQPFLMDLEGKQGNFKNLREFVFKNIDGY
FKIYSKHTPINLVRDLPQGFSALEPLVDLPIGINITRFQTLLALHRSYLT
PGDSSSGWTAGAAAYYVGYLQPRTFLLKYNENGTITDAVDCALDPLSETK
CTLKSFTVEKGIYQTSNFRVQPTESIVRFPNITNLCPFGEVFNATRFASV
YAWNRKRISNCVADYSVLYNSASFSTFKCYGVSPTKLNDLCFTNVYADSF
VIRGDEVRQIAPGQTGKIADYNYKLPDDFTGCVIAWNSNNLDSKVGGNYN
YLYRLFRKSNLKPFERDISTEIYQAGSTPCNGVEGFNCYFPLQSYGFQPT
NGVGYQPYRVVVLSFELLHAPATVCGPKKSTNLVKNKCVNFNFNGLTGTG
VLTESNKKFLPFQQFGRDIADTTDAVRDPQTLEILDITPCSFGGVSVITP
GTNTSNQVAVLYQDVNCTEVPVAIHADQLTPTWRVYSTGSNVFQTRAGCL
IGAEHVNNSYECDIPIGAGICASYQTQTNSPSRAGSVASQSIIAYTMSLG
AENSVAYSNNSIAIPTNFTISVTTEILPVSMTKTSVDCTMYICGDSTECS
NLLLQYGSFCTQLNRALTGIAVEQDKNTQEVFAQVKQIYKTPPIKDFGGF
NFSQILPDPSKPSKRSFIEDLLFNKVTLADAGFIKQYGDCLGDIAARDLI
CAQKFNGLTVLPPLLTDEMIAQYTSALLAGTITSGWTFGAGAALQIPFAM
QMAYRFNGIGVTQNVLYENQKLIANQFNSAIGKIQDSLSSTAGALGKLQD
VVNQNAQALNTLVKQLSSNFGAISSVLNDILSRLDKVEAEVQIDRLITGR
LQSLQTYVTQQLIRAAEIRASANLAATKMSECVLGQSKRVDFCGKGYHLM
SFPQSAPHGVVFLHVTYVPAQEKNFTTAPAICHDGKAHFPREGVFVSNGT
HWFVTQRNFYEPQIITTDNTFVSGNCDVVIGIVNNTVYDPLQPELDSFKE
ELDKYFKNHTSPDVDLGDISGINASVVNIQKEIDRLNEVAKNLNESLIDL
QELGKYEQYIKWPWYIWLGFIAGLIAIVMVTIMLCCMTSCCSCLKGCCSC
GSCCKFDEDDSEPVLKGVKLHYT

[0166] SEQ ID NO 38: SEQ ID NO 6 + D614N + A892P + A942P + T941G

MFVFLVLLPLVSSQCVNLTTRTQLPPAYTNSFTRGVYYPDKVFRSSVLHS
TQDLFLPFFSNVTWFHAIHVSGTNGTKRFDNPVLPFNDGVYFASTEKSNI
IRGWIFGTTLDSKTQSLLIVNNATNVVIKVCEFQFCNDPFLGVYYHKNNK
SWMESEFRVYSSANNCTFEYVSQPFLMDLEGKQGNFKNLREFVFKNIDGY
FKIYSKHTPINLVRDLPQGFSALEPLVDLPIGINITRFQTLLALHRSYLT
PGDSSSGWTAGAAAYYVGYLQPRTFLLKYNENGTITDAVDCALDPLSETK
CTLKSFTVEKGIYQTSNFRVQPTESIVRFPNITNLCPFGEVFNATRFASV
YAWNRKRISNCVADYSVLYNSASFSTFKCYGVSPTKLNDLCFTNVYADSF
VIRGDEVRQIAPGQTGKIADYNYKLPDDFTGCVIAWNSNNLDSKVGGNYN
YLYRLFRKSNLKPFERDISTEIYQAGSTPCNGVEGFNCYFPLQSYGFQPT
NGVGYQPYRVVVLSFELLHAPATVCGPKKSTNLVKNKCVNFNFNGLTGTG
VLTESNKKFLPFQQFGRDIADTTDAVRDPQTLEILDITPCSFGGVSVITP
GTNTSNQVAVLYQNVNCTEVPVAIHADQLTPTWRVYSTGSNVFQTRAGCL
IGAEHVNNSYECDIPIGAGICASYQTQTNSPSRAGSVASQSIIAYTMSLG
AENSVAYSNNSIAIPTNFTISVTTEILPVSMTKTSVDCTMYICGDSTECS
NLLLQYGSFCTQLNRALTGIAVEQDKNTQEVFAQVKQIYKTPPIKDFGGF
NFSQILPDPSKPSKRSFIEDLLFNKVTLADAGFIKQYGDCLGDIAARDLI
CAQKFNGLTVLPPLLTDEMIAQYTSALLAGTITSGWTFGAGPALQIPFAM
QMAYRFNGIGVTQNVLYENQKLIANQFNSAIGKIQDSLSSGPSALGKLQD
VVNQNAQALNTLVKQLSSNFGAISSVLNDILSRLDKVEAEVQIDRLITGR
LQSLQTYVTQQLIRAAEIRASANLAATKMSECVLGQSKRVDFCGKGYHLM
SFPQSAPHGVVFLHVTYVPAQEKNFTTAPAICHDGKAHFPREGVFVSNGT
HWFVTQRNFYEPQIITTDNTFVSGNCDVVIGIVNNTVYDPLQPELDSFKE
ELDKYFKNHTSPDVDLGDISGINASVVNIQKEIDRLNEVAKNLNESLIDL
QELGKYEQYIKWPWYIWLGFIAGLIAIVMVTIMLCCMTSCCSCLKGCCSC
GSCCKFDEDDSEPVLKGVKLHYT

[0167] SEQ ID NO 39: SEQ ID NO 6 + D614N + A892P + A942P + S943G

MFVFLVLLPLVSSQCVNLTTRTQLPPAYTNSFTRGVYYPDKVFRSSVLHS
TQDLFLPFFSNVTWFHAIHVSGTNGTKRFDNPVLPFNDGVYFASTEKSNI
IRGWIFGTTLDSKTQSLLIVNNATNVVIKVCEFQFCNDPFLGVYYHKNNK
SWMESEFRVYSSANNCTFEYVSQPFLMDLEGKQGNFKNLREFVFKNIDGY
FKIYSKHTPINLVRDLPQGFSALEPLVDLPIGINITRFQTLLALHRSYLT
PGDSSSGWTAGAAAYYVGYLQPRTFLLKYNENGTITDAVDCALDPLSETK
CTLKSFTVEKGIYQTSNFRVQPTESIVRFPNITNLCPFGEVFNATRFASV
YAWNRKRISNCVADYSVLYNSASFSTFKCYGVSPTKLNDLCFTNVYADSF
VIRGDEVRQIAPGQTGKIADYNYKLPDDFTGCVIAWNSNNLDSKVGGNYN
YLYRLFRKSNLKPFERDISTEIYQAGSTPCNGVEGFNCYFPLQSYGFQPT
NGVGYQPYRVVVLSFELLHAPATVCGPKKSTNLVKNKCVNFNFNGLTGTG
VLTESNKKFLPFQQFGRDIADTTDAVRDPQTLEILDITPCSFGGVSVITP
GTNTSNQVAVLYQNVNCTEVPVAIHADQLTPTWRVYSTGSNVFQTRAGCL
IGAEHVNNSYECDIPIGAGICASYQTQTNSPSRAGSVASQSIIAYTMSLG
AENSVAYSNNSIAIPTNFTISVTTEILPVSMTKTSVDCTMYICGDSTECS
NLLLQYGSFCTQLNRALTGIAVEQDKNTQEVFAQVKQIYKTPPIKDFGGF
NFSQILPDPSKPSKRSFIEDLLFNKVTLADAGFIKQYGDCLGDIAARDLI
CAQKFNGLTVLPPLLTDEMIAQYTSALLAGTITSGWTFGAGPALQIPFAM
QMAYRFNGIGVTQNVLYENQKLIANQFNSAIGKIQDSLSSTPGALGKLQD
VVNQNAQALNTLVKQLSSNFGAISSVLNDILSRLDKVEAEVQIDRLITGR
LQSLQTYVTQQLIRAAEIRASANLAATKMSECVLGQSKRVDFCGKGYHLM
SFPQSAPHGVVFLHVTYVPAQEKNFTTAPAICHDGKAHFPREGVFVSNGT
HWFVTQRNFYEPQIITTDNTFVSGNCDVVIGIVNNTVYDPLQPELDSFKE
ELDKYFKNHTSPDVDLGDISGINASVVNIQKEIDRLNEVAKNLNESLIDL
QELGKYEQYIKWPWYIWLGFIAGLIAIVMVTIMLCCMTSCCSCLKGCCSC
GSCCKFDEDDSEPVLKGVKLHYT

[0168] SEQ ID NO 40: SEQ ID NO 6 + D614N + A892P + A942P + T941G + S943G

MFVFLVLLPLVSSQCVNLTTRTQLPPAYTNSFTRGVYYPDKVFRSSVLHS
TQDLFLPFFSNVTWFHAIHVSGTNGTKRFDNPVLPFNDGVYFASTEKSNI
IRGWIFGTTLDSKTQSLLIVNNATNVVIKVCEFQFCNDPFLGVYYHKNNK
SWMESEFRVYSSANNCTFEYVSQPFLMDLEGKQGNFKNLREFVFKNIDGY
FKIYSKHTPINLVRDLPQGFSALEPLVDLPIGINITRFQTLLALHRSYLT
PGDSSSGWTAGAAAYYVGYLQPRTFLLKYNENGTITDAVDCALDPLSETK
CTLKSFTVEKGIYQTSNFRVQPTESIVRFPNITNLCPFGEVFNATRFASV
YAWNRKRISNCVADYSVLYNSASFSTFKCYGVSPTKLNDLCFTNVYADSF
VIRGDEVRQIAPGQTGKIADYNYKLPDDFTGCVIAWNSNNLDSKVGGNYN
YLYRLFRKSNLKPFERDISTEIYQAGSTPCNGVEGFNCYFPLQSYGFQPT
NGVGYQPYRVVVLSFELLHAPATVCGPKKSTNLVKNKCVNFNFNGLTGTG
VLTESNKKFLPFQQFGRDIADTTDAVRDPQTLEILDITPCSFGGVSVITP
GTNTSNQVAVLYQNVNCTEVPVAIHADQLTPTWRVYSTGSNVFQTRAGCL
IGAEHVNNSYECDIPIGAGICASYQTQTNSPSRAGSVASQSIIAYTMSLG
AENSVAYSNNSIAIPTNFTISVTTEILPVSMTKTSVDCTMYICGDSTECS
NLLLQYGSFCTQLNRALTGIAVEQDKNTQEVFAQVKQIYKTPPIKDFGGF
NFSQILPDPSKPSKRSFIEDLLFNKVTLADAGFIKQYGDCLGDIAARDLI
CAQKFNGLTVLPPLLTDEMIAQYTSALLAGTITSGWTFGAGPALQIPFAM
QMAYRFNGIGVTQNVLYENQKLIANQFNSAIGKIQDSLSSGPGALGKLQD
VVNQNAQALNTLVKQLSSNFGAISSVLNDILSRLDKVEAEVQIDRLITGR
LQSLQTYVTQQLIRAAEIRASANLAATKMSECVLGQSKRVDFCGKGYHLM
SFPQSAPHGVVFLHVTYVPAQEKNFTTAPAICHDGKAHFPREGVFVSNGT
HWFVTQRNFYEPQIITTDNTFVSGNCDVVIGIVNNTVYDPLQPELDSFKE
ELDKYFKNHTSPDVDLGDISGINASVVNIQKEIDRLNEVAKNLNESLIDL
QELGKYEQYIKWPWYIWLGFIAGLIAIVMVTIMLCCMTSCCSCLKGCCSC
GSCCKFDEDDSEPVLKGVKLHYT

[0169] SEQ ID NO 41: SEQ ID NO 6 + D614N + A892P + A942P + T941G + A944P

MFVFLVLLPLVSSQCVNLTTRTQLPPAYTNSFTRGVYYPDKVFRSSVLHS
TQDLFLPFFSNVTWFHAIHVSGTNGTKRFDNPVLPFNDGVYFASTEKSNI
IRGWIFGTTLDSKTQSLLIVNNATNVVIKVCEFQFCNDPFLGVYYHKNNK
SWMESEFRVYSSANNCTFEYVSQPFLMDLEGKQGNFKNLREFVFKNIDGY
FKIYSKHTPINLVRDLPQGFSALEPLVDLPIGINITRFQTLLALHRSYLT
PGDSSSGWTAGAAAYYVGYLQPRTFLLKYNENGTITDAVDCALDPLSETK
CTLKSFTVEKGIYQTSNFRVQPTESIVRFPNITNLCPFGEVFNATRFASV
YAWNRKRISNCVADYSVLYNSASFSTFKCYGVSPTKLNDLCFTNVYADSF
VIRGDEVRQIAPGQTGKIADYNYKLPDDFTGCVIAWNSNNLDSKVGGNYN
YLYRLFRKSNLKPFERDISTEIYQAGSTPCNGVEGFNCYFPLQSYGFQPT
NGVGYQPYRVVVLSFELLHAPATVCGPKKSTNLVKNKCVNFNFNGLTGTG
VLTESNKKFLPFQQFGRDIADTTDAVRDPQTLEILDITPCSFGGVSVITP
GTNTSNQVAVLYQNVNCTEVPVAIHADQLTPTWRVYSTGSNVFQTRAGCL
IGAEHVNNSYECDIPIGAGICASYQTQTNSPSRAGSVASQSIIAYTMSLG
AENSVAYSNNSIAIPTNFTISVTTEILPVSMTKTSVDCTMYICGDSTECS
NLLLQYGSFCTQLNRALTGIAVEQDKNTQEVFAQVKQIYKTPPIKDFGGF
NFSQILPDPSKPSKRSFIEDLLFNKVTLADAGFIKQYGDCLGDIAARDLI
CAQKFNGLTVLPPLLTDEMIAQYTSALLAGTITSGWTFGAGPALQIPFAM
QMAYRFNGIGVTQNVLYENQKLIANQFNSAIGKIQDSLSSGPSPLGKLQD
VVNQNAQALNTLVKQLSSNFGAISSVLNDILSRLDKVEAEVQIDRLITGR
LQSLQTYVTQQLIRAAEIRASANLAATKMSECVLGQSKRVDFCGKGYHLM
SFPQSAPHGVVFLHVTYVPAQEKNFTTAPAICHDGKAHFPREGVFVSNGT
HWFVTQRNFYEPQIITTDNTFVSGNCDVVIGIVNNTVYDPLQPELDSFKE
ELDKYFKNHTSPDVDLGDISGINASVVNIQKEIDRLNEVAKNLNESLIDL
QELGKYEQYIKWPWYIWLGFIAGLIAIVMVTIMLCCMTSCCSCLKGCCSC
GSCCKFDEDDSEPVLKGVKLHYT

[0170] SEQ ID NO 42: SEQ ID NO 6 + D614N + A892P + A942P + S943G + A944P

MFVFLVLLPLVSSQCVNLTTRTQLPPAYTNSFTRGVYYPDKVFRSSVLHS
TQDLFLPFFSNVTWFHAIHVSGTNGTKRFDNPVLPFNDGVYFASTEKSNI
IRGWIFGTTLDSKTQSLLIVNNATNVVIKVCEFQFCNDPFLGVYYHKNNK
SWMESEFRVYSSANNCTFEYVSQPFLMDLEGKQGNFKNLREFVFKNIDGY
FKIYSKHTPINLVRDLPQGFSALEPLVDLPIGINITRFQTLLALHRSYLT
PGDSSSGWTAGAAAYYVGYLQPRTFLLKYNENGTITDAVDCALDPLSETK
CTLKSFTVEKGIYQTSNFRVQPTESIVRFPNITNLCPFGEVFNATRFASV
YAWNRKRISNCVADYSVLYNSASFSTFKCYGVSPTKLNDLCFTNVYADSF
VIRGDEVRQIAPGQTGKIADYNYKLPDDFTGCVIAWNSNNLDSKVGGNYN
YLYRLFRKSNLKPFERDISTEIYQAGSTPCNGVEGFNCYFPLQSYGFQPT
NGVGYQPYRVVVLSFELLHAPATVCGPKKSTNLVKNKCVNFNFNGLTGTG
VLTESNKKFLPFQQFGRDIADTTDAVRDPQTLEILDITPCSFGGVSVITP
GTNTSNQVAVLYQNVNCTEVPVAIHADQLTPTWRVYSTGSNVFQTRAGCL
IGAEHVNNSYECDIPIGAGICASYQTQTNSPSRAGSVASQSIIAYTMSLG
AENSVAYSNNSIAIPTNFTISVTTEILPVSMTKTSVDCTMYICGDSTECS
NLLLQYGSFCTQLNRALTGIAVEQDKNTQEVFAQVKQIYKTPPIKDFGGF
NFSQILPDPSKPSKRSFIEDLLFNKVTLADAGFIKQYGDCLGDIAARDLI
CAQKFNGLTVLPPLLTDEMIAQYTSALLAGTITSGWTFGAGPALQIPFAM
QMAYRFNGIGVTQNVLYENQKLIANQFNSAIGKIQDSLSSTPGPLGKLQD
VVNQNAQALNTLVKQLSSNFGAISSVLNDILSRLDKVEAEVQIDRLITGR
LQSLQTYVTQQLIRAAEIRASANLAATKMSECVLGQSKRVDFCGKGYHLM
SFPQSAPHGVVFLHVTYVPAQEKNFTTAPAICHDGKAHFPREGVFVSNGT
HWFVTQRNFYEPQIITTDNTFVSGNCDVVIGIVNNTVYDPLQPELDSFKE
ELDKYFKNHTSPDVDLGDISGINASVVNIQKEIDRLNEVAKNLNESLIDL
QELGKYEQYIKWPWYIWLGFIAGLIAIVMVTIMLCCMTSCCSCLKGCCSC
GSCCKFDEDDSEPVLKGVKLHYT

[0171] SEQ ID NO 43: SEQ ID NO 6 + T941G + K986P

MFVFLVLLPLVSSQCVNLTTRTQLPPAYTNSFTRGVYYPDKVFRSSVLHS
TQDLFLPFFSNVTWFHAIHVSGTNGTKRFDNPVLPFNDGVYFASTEKSNI
IRGWIFGTTLDSKTQSLLIVNNATNVVIKVCEFQFCNDPFLGVYYHKNNK
SWMESEFRVYSSANNCTFEYVSQPFLMDLEGKQGNFKNLREFVFKNIDGY
FKIYSKHTPINLVRDLPQGFSALEPLVDLPIGINITRFQTLLALHRSYLT
PGDSSSGWTAGAAAYYVGYLQPRTFLLKYNENGTITDAVDCALDPLSETK
CTLKSFTVEKGIYQTSNFRVQPTESIVRFPNITNLCPFGEVFNATRFASV
YAWNRKRISNCVADYSVLYNSASFSTFKCYGVSPTKLNDLCFTNVYADSF
VIRGDEVRQIAPGQTGKIADYNYKLPDDFTGCVIAWNSNNLDSKVGGNYN
YLYRLFRKSNLKPFERDISTEIYQAGSTPCNGVEGFNCYFPLQSYGFQPT
NGVGYQPYRVVVLSFELLHAPATVCGPKKSTNLVKNKCVNFNFNGLTGTG
VLTESNKKFLPFQQFGRDIADTTDAVRDPQTLEILDITPCSFGGVSVITP
GTNTSNQVAVLYQDVNCTEVPVAIHADQLTPTWRVYSTGSNVFQTRAGCL
IGAEHVNNSYECDIPIGAGICASYQTQTNSPSRAGSVASQSIIAYTMSLG
AENSVAYSNNSIAIPTNFTISVTTEILPVSMTKTSVDCTMYICGDSTECS
NLLLQYGSFCTQLNRALTGIAVEQDKNTQEVFAQVKQIYKTPPIKDFGGF
NFSQILPDPSKPSKRSFIEDLLFNKVTLADAGFIKQYGDCLGDIAARDLI
CAQKFNGLTVLPPLLTDEMIAQYTSALLAGTITSGWTFGAGAALQIPFAM
QMAYRFNGIGVTQNVLYENQKLIANQFNSAIGKIQDSLSSGASALGKLQD
VVNQNAQALNTLVKQLSSNFGAISSVLNDILSRLDPVEAEVQIDRLITGR
LQSLQTYVTQQLIRAAEIRASANLAATKMSECVLGQSKRVDFCGKGYHLM
SFPQSAPHGVVFLHVTYVPAQEKNFTTAPAICHDGKAHFPREGVFVSNGT
HWFVTQRNFYEPQIITTDNTFVSGNCDVVIGIVNNTVYDPLQPELDSFKE
ELDKYFKNHTSPDVDLGDISGINASVVNIQKEIDRLNEVAKNLNESLIDL
QELGKYEQYIKWPWYIWLGFIAGLIAIVMVTIMLCCMTSCCSCLKGCCSC
GSCCKFDEDDSEPVLKGVKLHYT

[0172] SEQ ID NO 44: SEQ ID NO 6 + S943G + K986P

MFVFLVLLPLVSSQCVNLTTRTQLPPAYTNSFTRGVYYPDKVFRSSVLHS
TQDLFLPFFSNVTWFHAIHVSGTNGTKRFDNPVLPFNDGVYFASTEKSNI
IRGWIFGTTLDSKTQSLLIVNNATNVVIKVCEFQFCNDPFLGVYYHKNNK
SWMESEFRVYSSANNCTFEYVSQPFLMDLEGKQGNFKNLREFVFKNIDGY
FKIYSKHTPINLVRDLPQGFSALEPLVDLPIGINITRFQTLLALHRSYLT
PGDSSSGWTAGAAAYYVGYLQPRTFLLKYNENGTITDAVDCALDPLSETK
CTLKSFTVEKGIYQTSNFRVQPTESIVRFPNITNLCPFGEVFNATRFASV
YAWNRKRISNCVADYSVLYNSASFSTFKCYGVSPTKLNDLCFTNVYADSF
VIRGDEVRQIAPGQTGKIADYNYKLPDDFTGCVIAWNSNNLDSKVGGNYN
YLYRLFRKSNLKPFERDISTEIYQAGSTPCNGVEGFNCYFPLQSYGFQPT
NGVGYQPYRVVVLSFELLHAPATVCGPKKSTNLVKNKCVNFNFNGLTGTG
VLTESNKKFLPFQQFGRDIADTTDAVRDPQTLEILDITPCSFGGVSVITP
GTNTSNQVAVLYQDVNCTEVPVAIHADQLTPTWRVYSTGSNVFQTRAGCL
IGAEHVNNSYECDIPIGAGICASYQTQTNSPSRAGSVASQSIIAYTMSLG
AENSVAYSNNSIAIPTNFTISVTTEILPVSMTKTSVDCTMYICGDSTECS
NLLLQYGSFCTQLNRALTGIAVEQDKNTQEVFAQVKQIYKTPPIKDFGGF
NFSQILPDPSKPSKRSFIEDLLFNKVTLADAGFIKQYGDCLGDIAARDLI
CAQKFNGLTVLPPLLTDEMIAQYTSALLAGTITSGWTFGAGAALQIPFAM
QMAYRFNGIGVTQNVLYENQKLIANQFNSAIGKIQDSLSSTAGALGKLQD
VVNQNAQALNTLVKQLSSNFGAISSVLNDILSRLDPVEAEVQIDRLITGR
LQSLQTYVTQQLIRAAEIRASANLAATKMSECVLGQSKRVDFCGKGYHLM
SFPQSAPHGVVFLHVTYVPAQEKNFTTAPAICHDGKAHFPREGVFVSNGT
HWFVTQRNFYEPQIITTDNTFVSGNCDVVIGIVNNTVYDPLQPELDSFKE
ELDKYFKNHTSPDVDLGDISGINASVVNIQKEIDRLNEVAKNLNESLIDL
QELGKYEQYIKWPWYIWLGFIAGLIAIVMVTIMLCCMTSCCSCLKGCCSC
GSCCKFDEDDSEPVLKGVKLHYT

[0173] SEQ ID NO 45: SEQ ID NO 6 + D614N + A892P + A942P + T941G + K986P

MFVFLVLLPLVSSQCVNLTTRTQLPPAYTNSFTRGVYYPDKVFRSSVLHS
TQDLFLPFFSNVTWFHAIHVSGTNGTKRFDNPVLPFNDGVYFASTEKSNI
IRGWIFGTTLDSKTQSLLIVNNATNVVIKVCEFQFCNDPFLGVYYHKNNK
SWMESEFRVYSSANNCTFEYVSQPFLMDLEGKQGNFKNLREFVFKNIDGY
FKIYSKHTPINLVRDLPQGFSALEPLVDLPIGINITRFQTLLALHRSYLT
PGDSSSGWTAGAAAYYVGYLQPRTFLLKYNENGTITDAVDCALDPLSETK
CTLKSFTVEKGIYQTSNFRVQPTESIVRFPNITNLCPFGEVFNATRFASV
YAWNRKRISNCVADYSVLYNSASFSTFKCYGVSPTKLNDLCFTNVYADSF
VIRGDEVRQIAPGQTGKIADYNYKLPDDFTGCVIAWNSNNLDSKVGGNYN
YLYRLFRKSNLKPFERDISTEIYQAGSTPCNGVEGFNCYFPLQSYGFQPT
NGVGYQPYRVVVLSFELLHAPATVCGPKKSTNLVKNKCVNFNFNGLTGTG
VLTESNKKFLPFQQFGRDIADTTDAVRDPQTLEILDITPCSFGGVSVITP
GTNTSNQVAVLYQNVNCTEVPVAIHADQLTPTWRVYSTGSNVFQTRAGCL
IGAEHVNNSYECDIPIGAGICASYQTQTNSPSRAGSVASQSIIAYTMSLG
AENSVAYSNNSIAIPTNFTISVTTEILPVSMTKTSVDCTMYICGDSTECS
NLLLQYGSFCTQLNRALTGIAVEQDKNTQEVFAQVKQIYKTPPIKDFGGF
NFSQILPDPSKPSKRSFIEDLLFNKVTLADAGFIKQYGDCLGDIAARDLI
CAQKFNGLTVLPPLLTDEMIAQYTSALLAGTITSGWTFGAGPALQIPFAM
QMAYRFNGIGVTQNVLYENQKLIANQFNSAIGKIQDSLSSGPSALGKLQD
VVNQNAQALNTLVKQLSSNFGAISSVLNDILSRLDPVEAEVQIDRLITGR
LQSLQTYVTQQLIRAAEIRASANLAATKMSECVLGQSKRVDFCGKGYHLM
SFPQSAPHGVVFLHVTYVPAQEKNFTTAPAICHDGKAHFPREGVFVSNGT
HWFVTQRNFYEPQIITTDNTFVSGNCDVVIGIVNNTVYDPLQPELDSFKE
ELDKYFKNHTSPDVDLGDISGINASVVNIQKEIDRLNEVAKNLNESLIDL
QELGKYEQYIKWPWYIWLGFIAGLIAIVMVTIMLCCMTSCCSCLKGCCSC
GSCCKFDEDDSEPVLKGVKLHYT

[0174] SEQ ID NO 46: SEQ ID NO 6 + D614N + A892P + A942P + S943G + K986P

MFVFLVLLPLVSSQCVNLTTRTQLPPAYTNSFTRGVYYPDKVFRSSVLHS
TQDLFLPFFSNVTWFHAIHVSGTNGTKRFDNPVLPFNDGVYFASTEKSNI
IRGWIFGTTLDSKTQSLLIVNNATNVVIKVCEFQFCNDPFLGVYYHKNNK
SWMESEFRVYSSANNCTFEYVSQPFLMDLEGKQGNFKNLREFVFKNIDGY
FKIYSKHTPINLVRDLPQGFSALEPLVDLPIGINITRFQTLLALHRSYLT
PGDSSSGWTAGAAAYYVGYLQPRTFLLKYNENGTITDAVDCALDPLSETK
CTLKSFTVEKGIYQTSNFRVQPTESIVRFPNITNLCPFGEVFNATRFASV
YAWNRKRISNCVADYSVLYNSASFSTFKCYGVSPTKLNDLCFTNVYADSF
VIRGDEVRQIAPGQTGKIADYNYKLPDDFTGCVIAWNSNNLDSKVGGNYN
YLYRLFRKSNLKPFERDISTEIYQAGSTPCNGVEGFNCYFPLQSYGFQPT
NGVGYQPYRVVVLSFELLHAPATVCGPKKSTNLVKNKCVNFNFNGLTGTG
VLTESNKKFLPFQQFGRDIADTTDAVRDPQTLEILDITPCSFGGVSVITP
GTNTSNQVAVLYQNVNCTEVPVAIHADQLTPTWRVYSTGSNVFQTRAGCL
IGAEHVNNSYECDIPIGAGICASYQTQTNSPSRAGSVASQSIIAYTMSLG
AENSVAYSNNSIAIPTNFTISVTTEILPVSMTKTSVDCTMYICGDSTECS
NLLLQYGSFCTQLNRALTGIAVEQDKNTQEVFAQVKQIYKTPPIKDFGGF
NFSQILPDPSKPSKRSFIEDLLFNKVTLADAGFIKQYGDCLGDIAARDLI
CAQKFNGLTVLPPLLTDEMIAQYTSALLAGTITSGWTFGAGPALQIPFAM
QMAYRFNGIGVTQNVLYENQKLIANQFNSAIGKIQDSLSSTPGALGKLQD
VVNQNAQALNTLVKQLSSNFGAISSVLNDILSRLDPVEAEVQIDRLITGR
LQSLQTYVTQQLIRAAEIRASANLAATKMSECVLGQSKRVDFCGKGYHLM
SFPQSAPHGVVFLHVTYVPAQEKNFTTAPAICHDGKAHFPREGVFVSNGT
HWFVTQRNFYEPQIITTDNTFVSGNCDVVIGIVNNTVYDPLQPELDSFKE
ELDKYFKNHTSPDVDLGDISGINASVVNIQKEIDRLNEVAKNLNESLIDL
QELGKYEQYIKWPWYIWLGFIAGLIAIVMVTIMLCCMTSCCSCLKGCCSC
GSCCKFDEDDSEPVLKGVKLHYT

[0175] SEQ ID NO 47: SEQ ID NO 6 + D614N + A892P + A942P + T941G + S943G + K986P

MFVFLVLLPLVSSQCVNLTTRTQLPPAYTNSFTRGVYYPDKVFRSSVLHS
TQDLFLPFFSNVTWFHAIHVSGTNGTKRFDNPVLPFNDGVYFASTEKSNI
IRGWIFGTTLDSKTQSLLIVNNATNVVIKVCEFQFCNDPFLGVYYHKNNK
SWMESEFRVYSSANNCTFEYVSQPFLMDLEGKQGNFKNLREFVFKNIDGY
FKIYSKHTPINLVRDLPQGFSALEPLVDLPIGINITRFQTLLALHRSYLT
PGDSSSGWTAGAAAYYVGYLQPRTFLLKYNENGTITDAVDCALDPLSETK
CTLKSFTVEKGIYQTSNFRVQPTESIVRFPNITNLCPFGEVFNATRFASV
YAWNRKRISNCVADYSVLYNSASFSTFKCYGVSPTKLNDLCFTNVYADSF
VIRGDEVRQIAPGQTGKIADYNYKLPDDFTGCVIAWNSNNLDSKVGGNYN
YLYRLFRKSNLKPFERDISTEIYQAGSTPCNGVEGFNCYFPLQSYGFQPT
NGVGYQPYRVVVLSFELLHAPATVCGPKKSTNLVKNKCVNFNFNGLTGTG
VLTESNKKFLPFQQFGRDIADTTDAVRDPQTLEILDITPCSFGGVSVITP
GTNTSNQVAVLYQNVNCTEVPVAIHADQLTPTWRVYSTGSNVFQTRAGCL
IGAEHVNNSYECDIPIGAGICASYQTQTNSPSRAGSVASQSIIAYTMSLG
AENSVAYSNNSIAIPTNFTISVTTEILPVSMTKTSVDCTMYICGDSTECS
NLLLQYGSFCTQLNRALTGIAVEQDKNTQEVFAQVKQIYKTPPIKDFGGF
NFSQILPDPSKPSKRSFIEDLLFNKVTLADAGFIKQYGDCLGDIAARDLI
CAQKFNGLTVLPPLLTDEMIAQYTSALLAGTITSGWTFGAGPALQIPFAM
QMAYRFNGIGVTQNVLYENQKLIANQFNSAIGKIQDSLSSGPGALGKLQD
VVNQNAQALNTLVKQLSSNFGAISSVLNDILSRLDPVEAEVQIDRLITGR
LQSLQTYVTQQLIRAAEIRASANLAATKMSECVLGQSKRVDFCGKGYHLM
SFPQSAPHGVVFLHVTYVPAQEKNFTTAPAICHDGKAHFPREGVFVSNGT
HWFVTQRNFYEPQIITTDNTFVSGNCDVVIGIVNNTVYDPLQPELDSFKE
ELDKYFKNHTSPDVDLGDISGINASVVNIQKEIDRLNEVAKNLNESLIDL
QELGKYEQYIKWPWYIWLGFIAGLIAIVMVTIMLCCMTSCCSCLKGCCSC
GSCCKFDEDDSEPVLKGVKLHYT

[0176] SEQ ID NO 48: SEQ ID NO 6 + D614N + A892P + A942P + T941G + A944P + K986P

MFVFLVLLPLVSSQCVNLTTRTQLPPAYTNSFTRGVYYPDKVFRSSVLHS
TQDLFLPFFSNVTWFHAIHVSGTNGTKRFDNPVLPFNDGVYFASTEKSNI
IRGWIFGTTLDSKTQSLLIVNNATNVVIKVCEFQFCNDPFLGVYYHKNNK
SWMESEFRVYSSANNCTFEYVSQPFLMDLEGKQGNFKNLREFVFKNIDGY
FKIYSKHTPINLVRDLPQGFSALEPLVDLPIGINITRFQTLLALHRSYLT
PGDSSSGWTAGAAAYYVGYLQPRTFLLKYNENGTITDAVDCALDPLSETK
CTLKSFTVEKGIYQTSNFRVQPTESIVRFPNITNLCPFGEVFNATRFASV
YAWNRKRISNCVADYSVLYNSASFSTFKCYGVSPTKLNDLCFTNVYADSF
VIRGDEVRQIAPGQTGKIADYNYKLPDDFTGCVIAWNSNNLDSKVGGNYN
YLYRLFRKSNLKPFERDISTEIYQAGSTPCNGVEGFNCYFPLQSYGFQPT
NGVGYQPYRVVVLSFELLHAPATVCGPKKSTNLVKNKCVNFNFNGLTGTG
VLTESNKKFLPFQQFGRDIADTTDAVRDPQTLEILDITPCSFGGVSVITP
GTNTSNQVAVLYQNVNCTEVPVAIHADQLTPTWRVYSTGSNVFQTRAGCL
IGAEHVNNSYECDIPIGAGICASYQTQTNSPSRAGSVASQSIIAYTMSLG
AENSVAYSNNSIAIPTNFTISVTTEILPVSMTKTSVDCTMYICGDSTECS
NLLLQYGSFCTQLNRALTGIAVEQDKNTQEVFAQVKQIYKTPPIKDFGGF
NFSQILPDPSKPSKRSFIEDLLFNKVTLADAGFIKQYGDCLGDIAARDLI
CAQKFNGLTVLPPLLTDEMIAQYTSALLAGTITSGWTFGAGPALQIPFAM
QMAYRFNGIGVTQNVLYENQKLIANQFNSAIGKIQDSLSSGPSPLGKLQD
VVNQNAQALNTLVKQLSSNFGAISSVLNDILSRLDPVEAEVQIDRLITGR
LQSLQTYVTQQLIRAAEIRASANLAATKMSECVLGQSKRVDFCGKGYHLM
SFPQSAPHGVVFLHVTYVPAQEKNFTTAPAICHDGKAHFPREGVFVSNGT
HWFVTQRNFYEPQIITTDNTFVSGNCDVVIGIVNNTVYDPLQPELDSFKE
ELDKYFKNHTSPDVDLGDISGINASVVNIQKEIDRLNEVAKNLNESLIDL
QELGKYEQYIKWPWYIWLGFIAGLIAIVMVTIMLCCMTSCCSCLKGCCSC
GSCCKFDEDDSEPVLKGVKLHYT

[0177] SEQ ID NO 49: SEQ ID NO 6 + D614N + A892P + A942P + S943G + A944P + K986P

MFVFLVLLPLVSSQCVNLTTRTQLPPAYTNSFTRGVYYPDKVFRSSVLHS
TQDLFLPFFSNVTWFHAIHVSGTNGTKRFDNPVLPFNDGVYFASTEKSNI
IRGWIFGTTLDSKTQSLLIVNNATNVVIKVCEFQFCNDPFLGVYYHKNNK
SWMESEFRVYSSANNCTFEYVSQPFLMDLEGKQGNFKNLREFVFKNIDGY
FKIYSKHTPINLVRDLPQGFSALEPLVDLPIGINITRFQTLLALHRSYLT
PGDSSSGWTAGAAAYYVGYLQPRTFLLKYNENGTITDAVDCALDPLSETK
CTLKSFTVEKGIYQTSNFRVQPTESIVRFPNITNLCPFGEVFNATRFASV
YAWNRKRISNCVADYSVLYNSASFSTFKCYGVSPTKLNDLCFTNVYADSF
VIRGDEVRQIAPGQTGKIADYNYKLPDDFTGCVIAWNSNNLDSKVGGNYN
YLYRLFRKSNLKPFERDISTEIYQAGSTPCNGVEGFNCYFPLQSYGFQPT
NGVGYQPYRVVVLSFELLHAPATVCGPKKSTNLVKNKCVNFNFNGLTGTG
VLTESNKKFLPFQQFGRDIADTTDAVRDPQTLEILDITPCSFGGVSVITP
GTNTSNQVAVLYQNVNCTEVPVAIHADQLTPTWRVYSTGSNVFQTRAGCL
IGAEHVNNSYECDIPIGAGICASYQTQTNSPSRAGSVASQSIIAYTMSLG
AENSVAYSNNSIAIPTNFTISVTTEILPVSMTKTSVDCTMYICGDSTECS
NLLLQYGSFCTQLNRALTGIAVEQDKNTQEVFAQVKQIYKTPPIKDFGGF
NFSQILPDPSKPSKRSFIEDLLFNKVTLADAGFIKQYGDCLGDIAARDLI
CAQKFNGLTVLPPLLTDEMIAQYTSALLAGTITSGWTFGAGPALQIPFAM
QMAYRFNGIGVTQNVLYENQKLIANQFNSAIGKIQDSLSSTPGPLGKLQD
VVNQNAQALNTLVKQLSSNFGAISSVLNDILSRLDPVEAEVQIDRLITGR
LQSLQTYVTQQLIRAAEIRASANLAATKMSECVLGQSKRVDFCGKGYHLM
SFPQSAPHGVVFLHVTYVPAQEKNFTTAPAICHDGKAHFPREGVFVSNGT
HWFVTQRNFYEPQIITTDNTFVSGNCDVVIGIVNNTVYDPLQPELDSFKE
ELDKYFKNHTSPDVDLGDISGINASVVNIQKEIDRLNEVAKNLNESLIDL
QELGKYEQYIKWPWYIWLGFIAGLIAIVMVTIMLCCMTSCCSCLKGCCSC
GSCCKFDEDDSEPVLKGVKLHYT

[0178] SEQ ID NO 50: SEQ ID NO 6 + T941G + V987P

MFVFLVLLPLVSSQCVNLTTRTQLPPAYTNSFTRGVYYPDKVFRSSVLHS
TQDLFLPFFSNVTWFHAIHVSGTNGTKRFDNPVLPFNDGVYFASTEKSNI
IRGWIFGTTLDSKTQSLLIVNNATNVVIKVCEFQFCNDPFLGVYYHKNNK
SWMESEFRVYSSANNCTFEYVSQPFLMDLEGKQGNFKNLREFVFKNIDGY
FKIYSKHTPINLVRDLPQGFSALEPLVDLPIGINITRFQTLLALHRSYLT
PGDSSSGWTAGAAAYYVGYLQPRTFLLKYNENGTITDAVDCALDPLSETK
CTLKSFTVEKGIYQTSNFRVQPTESIVRFPNITNLCPFGEVFNATRFASV
YAWNRKRISNCVADYSVLYNSASFSTFKCYGVSPTKLNDLCFTNVYADSF
VIRGDEVRQIAPGQTGKIADYNYKLPDDFTGCVIAWNSNNLDSKVGGNYN
YLYRLFRKSNLKPFERDISTEIYQAGSTPCNGVEGFNCYFPLQSYGFQPT
NGVGYQPYRVVVLSFELLHAPATVCGPKKSTNLVKNKCVNFNFNGLTGTG
VLTESNKKFLPFQQFGRDIADTTDAVRDPQTLEILDITPCSFGGVSVITP
GTNTSNQVAVLYQDVNCTEVPVAIHADQLTPTWRVYSTGSNVFQTRAGCL
IGAEHVNNSYECDIPIGAGICASYQTQTNSPSRAGSVASQSIIAYTMSLG
AENSVAYSNNSIAIPTNFTISVTTEILPVSMTKTSVDCTMYICGDSTECS
NLLLQYGSFCTQLNRALTGIAVEQDKNTQEVFAQVKQIYKTPPIKDFGGF
NFSQILPDPSKPSKRSFIEDLLFNKVTLADAGFIKQYGDCLGDIAARDLI
CAQKFNGLTVLPPLLTDEMIAQYTSALLAGTITSGWTFGAGAALQIPFAM
QMAYRFNGIGVTQNVLYENQKLIANQFNSAIGKIQDSLSSGASALGKLQD
VVNQNAQALNTLVKQLSSNFGAISSVLNDILSRLDKPEAEVQIDRLITGR
LQSLQTYVTQQLIRAAEIRASANLAATKMSECVLGQSKRVDFCGKGYHLM
SFPQSAPHGVVFLHVTYVPAQEKNFTTAPAICHDGKAHFPREGVFVSNGT
HWFVTQRNFYEPQIITTDNTFVSGNCDVVIGIVNNTVYDPLQPELDSFKE
ELDKYFKNHTSPDVDLGDISGINASVVNIQKEIDRLNEVAKNLNESLIDL
QELGKYEQYIKWPWYIWLGFIAGLIAIVMVTIMLCCMTSCCSCLKGCCSC
GSCCKFDEDDSEPVLKGVKLHYT

[0179] SEQ ID NO 51: SEQ ID NO 6 + S943G + V987P

MFVFLVLLPLVSSQCVNLTTRTQLPPAYTNSFTRGVYYPDKVFRSSVLHS
TQDLFLPFFSNVTWFHAIHVSGTNGTKRFDNPVLPFNDGVYFASTEKSNI
IRGWIFGTTLDSKTQSLLIVNNATNVVIKVCEFQFCNDPFLGVYYHKNNK
SWMESEFRVYSSANNCTFEYVSQPFLMDLEGKQGNFKNLREFVFKNIDGY
FKIYSKHTPINLVRDLPQGFSALEPLVDLPIGINITRFQTLLALHRSYLT
PGDSSSGWTAGAAAYYVGYLQPRTFLLKYNENGTITDAVDCALDPLSETK
CTLKSFTVEKGIYQTSNFRVQPTESIVRFPNITNLCPFGEVFNATRFASV
YAWNRKRISNCVADYSVLYNSASFSTFKCYGVSPTKLNDLCFTNVYADSF
VIRGDEVRQIAPGQTGKIADYNYKLPDDFTGCVIAWNSNNLDSKVGGNYN
YLYRLFRKSNLKPFERDISTEIYQAGSTPCNGVEGFNCYFPLQSYGFQPT
NGVGYQPYRVVVLSFELLHAPATVCGPKKSTNLVKNKCVNFNFNGLTGTG
VLTESNKKFLPFQQFGRDIADTTDAVRDPQTLEILDITPCSFGGVSVITP
GTNTSNQVAVLYQDVNCTEVPVAIHADQLTPTWRVYSTGSNVFQTRAGCL
IGAEHVNNSYECDIPIGAGICASYQTQTNSPSRAGSVASQSIIAYTMSLG
AENSVAYSNNSIAIPTNFTISVTTEILPVSMTKTSVDCTMYICGDSTECS
NLLLQYGSFCTQLNRALTGIAVEQDKNTQEVFAQVKQIYKTPPIKDFGGF
NFSQILPDPSKPSKRSFIEDLLFNKVTLADAGFIKQYGDCLGDIAARDLI
CAQKFNGLTVLPPLLTDEMIAQYTSALLAGTITSGWTFGAGAALQIPFAM
QMAYRFNGIGVTQNVLYENQKLIANQFNSAIGKIQDSLSSTAGALGKLQD
VVNQNAQALNTLVKQLSSNFGAISSVLNDILSRLDKPEAEVQIDRLITGR
LQSLQTYVTQQLIRAAEIRASANLAATKMSECVLGQSKRVDFCGKGYHLM
SFPQSAPHGVVFLHVTYVPAQEKNFTTAPAICHDGKAHFPREGVFVSNGT
HWFVTQRNFYEPQIITTDNTFVSGNCDVVIGIVNNTVYDPLQPELDSFKE
ELDKYFKNHTSPDVDLGDISGINASVVNIQKEIDRLNEVAKNLNESLIDL
QELGKYEQYIKWPWYIWLGFIAGLIAIVMVTIMLCCMTSCCSCLKGCCSC
GSCCKFDEDDSEPVLKGVKLHYT

[0180] SEQ ID NO 52: SEQ ID NO 6 + D614N + A892P + A942P + T941G + V987P

MFVFLVLLPLVSSQCVNLTTRTQLPPAYTNSFTRGVYYPDKVFRSSVLHS
TQDLFLPFFSNVTWFHAIHVSGTNGTKRFDNPVLPFNDGVYFASTEKSNI
IRGWIFGTTLDSKTQSLLIVNNATNVVIKVCEFQFCNDPFLGVYYHKNNK
SWMESEFRVYSSANNCTFEYVSQQPFLMDLEGKQGNFKNLREFVFKNIDG
YFKIYSKHTPINLVRDLPQGFSALEPLVDLPIGINITRFQTLLALHRSYL
TPGDSSSGWTAGAAAYYVGYLQPRTFLLKYNENGTITDAVDCALDPLSET
KCTLKSFTVEKGIYQTSNFRVQPTESIVRFPNITNLCPFGEVFNATRFAS
VYAWNRKRISNCVADYSVLYNSASFSTFKCYGVSPTKLNDLCFTNVYADS
FVIRGDEVRQIAPGQTGKIADYNYKLPDDFTGCVIAWNSNNLDSKVGGNY
NYLYRLFRKSNLKPFERDISTEIYQAGSTPCNGVEGFNCYFPLQSYGFQP
TNGVGYQPYRVVVLSFELLHAPATVCGPKKSTNLVKNKCVNFNFNGLTGT
GVLTESNKKFLPFQQFGRDIADTTDAVRDPQTLEILDITPCSFGGVSVIT
PGTNTSNQVAVLYQNVNCTEVPVAIHADQLTPTWRVYSTGSNVFQTRAGC
LIGAEHVNNSYECDIPIGAGICASYQTQTNSPSRAGSVASQSIIAYTMSL
GAENSVAYSNNSIAIPTNFTISVTTEILPVSMTKTSVDCTMYICGDSTEC
SNLLLQYGSFCTQLNRALTGIAVEQDKNTQEVFAQVKQIYKTPPIKDFGG
FNFSQILPDPSKPSKRSFIEDLLFNKVTLADAGFIKQYGDCLGDIAARDL
ICAQKFNGLTVLPPLLTDEMIAQYTSALLAGTITSGWTFGAGPALQIPFA
MQMAYRFNGIGVTQNVLYENQKLIANQFNSAIGKIQDSLSSGPSALGKLQ
DVVNQNAQALNTLVKQLSSNFGAISSVLNDILSRLDKPEAEVQIDRLITG
RLQSLQTYVTQQLIRAAEIRASANLAATKMSECVLGQSKRVDFCGKGYHL
MSFPQSAPHGVVFLHVTYVPAQEKNFTTAPAICHDGKAHFPREGVFVSNG
THWFVTQRNFYEPQIITTDNTFVSGNCDVVIGIVNNTVYDPLQPELDSFK
EELDKYFKNHTSPDVDLGDISGINASVVNIQKEIDRLNEVAKNLNESLID
LQELGKYEQYIKWPWYIWLGFIAGLIAIVMVTIMLCCMTSCCSCLKGCCS
CGSCCKFDEDDSEPVLKGVKLHYT

[0181] SEQ ID NO 53: SEQ ID NO 6 + D614N + A892P + A942P + S943G + V987P

MFVFLVLLPLVSSQCVNLTTRTQLPPAYTNSFTRGVYYPDKVFRSSVLHS
TQDLFLPFFSNVTWFHAIHVSGTNGTKRFDNPVLPFNDGVYFASTEKSNI
IRGWIFGTTLDSKTQSLLIVNNATNVVIKVCEFQFCNDPFLGVYYHKNNK
SWMESEFRVYSSANNCTFEYVSQPFLMDLEGKQGNFKNLREFVFKNIDGY
FKIYSKHTPINLVRDLPQGFSALEPLVDLPIGINITRFQTLLALHRSYLT
PGDSSSGWTAGAAAYYVGYLQPRTFLLKYNENGTITDAVDCALDPLSETK
CTLKSFTVEKGIYQTSNFRVQPTESIVRFPNITNLCPFGEVFNATRFASV
YAWNRKRISNCVADYSVLYNSASFSTFKCYGVSPTKLNDLCFTNVYADSF
VIRGDEVRQIAPGQTGKIADYNYKLPDDFTGCVIAWNSNNLDSKVGGNYN
YLYRLFRKSNLKPFERDISTEIYQAGSTPCNGVEGFNCYFPLQSYGFQPT
NGVGYQPYRVVVLSFELLHAPATVCGPKKSTNLVKNKCVNFNFNGLTGTG
VLTESNKKFLPFQQFGRDIADTTDAVRDPQTLEILDITPCSFGGVSVITP
GTNTSNQVAVLYQNVNCTEVPVAIHADQLTPTWRVYSTGSNVFQTRAGCL
IGAEHVNNSYECDIPIGAGICASYQTQTNSPSRAGSVASQSIIAYTMSLG
AENSVAYSNNSIAIPTNFTISVTTEILPVSMTKTSVDCTMYICGDSTECS
NLLLQYGSFCTQLNRALTGIAVEQDKNTQEVFAQVKQIYKTPPIKDFGGF
NFSQILPDPSKPSKRSFIEDLLFNKVTLADAGFIKQYGDCLGDIAARDLI
CAQKFNGLTVLPPLLTDEMIAQYTSALLAGTITSGWTFGAGPALQIPFAM
QMAYRFNGIGVTQNVLYENQKLIANQFNSAIGKIQDSLSSTPGALGKLQD
VVNQNAQALNTLVKQLSSNFGAISSVLNDILSRLDKPEAEVQIDRLITGR
LQSLQTYVTQQLIRAAEIRASANLAATKMSECVLGQSKRVDFCGKGYHLM
SFPQSAPHGVVFLHVTYVPAQEKNFTTAPAICHDGKAHFPREGVFVSNGT
HWFVTQRNFYEPQIITTDNTFVSGNCDVVIGIVNNTVYDPLQPELDSFKE
ELDKYFKNHTSPDVDLGDISGINASVVNIQKEIDRLNEVAKNLNESLIDL
QELGKYEQYIKWPWYIWLGFIAGLIAIVMVTIMLCCMTSCCSCLKGCCSC
GSCCKFDEDDSEPVLKGVKLHYT

[0182] SEQ ID NO 54: SEQ ID NO 6 + D614N + A892P + A942P + T941G + S943G + V987P

MFVFLVLLPLVSSQCVNLTTRTQLPPAYTNSFTRGVYYPDKVFRSSVLHS
TQDLFLPFFSNVTWFHAIHVSGTNGTKRFDNPVLPFNDGVYFASTEKSNI
IRGWIFGTTLDSKTQSLLIVNNATNVVIKVCEFQFCNDPFLGVYYHKNNK
SWMESEFRVYSSANNCTFEYVSQPFLMDLEGKQGNFKNLREFVFKNIDGY
FKIYSKHTPINLVRDLPQGFSALEPLVDLPIGINITRFQTLLALHRSYLT
PGDSSSGWTAGAAAYYVGYLQPRTFLLKYNENGTITDAVDCALDPLSETK
CTLKSFTVEKGIYQTSNFRVQPTESIVRFPNITNLCPFGEVFNATRFASV
YAWNRKRISNCVADYSVLYNSASFSTFKCYGVSPTKLNDLCFTNVYADSF
VIRGDEVRQIAPGQTGKIADYNYKLPDDFTGCVIAWNSNNLDSKVGGNYN
YLYRLFRKSNLKPFERDISTEIYQAGSTPCNGVEGFNCYFPLQSYGFQPT
NGVGYQPYRVVVLSFELLHAPATVCGPKKSTNLVKNKCVNFNFNGLTGTG
VLTESNKKFLPFQQFGRDIADTTDAVRDPQTLEILDITPCSFGGVSVITP
GTNTSNQVAVLYQNVNCTEVPVAIHADQLTPTWRVYSTGSNVFQTRAGCL
IGAEHVNNSYECDIPIGAGICASYQTQTNSPSRAGSVASQSIIAYTMSLG
AENSVAYSNNSIAIPTNFTISVTTEILPVSMTKTSVDCTMYICGDSTECS
NLLLQYGSFCTQLNRALTGIAVEQDKNTQEVFAQVKQIYKTPPIKDFGGF
NFSQILPDPSKPSKRSFIEDLLFNKVTLADAGFIKQYGDCLGDIAARDLI
CAQKFNGLTVLPPLLTDEMIAQYTSALLAGTITSGWTFGAGPALQIPFAM
QMAYRFNGIGVTQNVLYENQKLIANQFNSAIGKIQDSLSSGPGALGKLQD
VVNQNAQALNTLVKQLSSNFGAISSVLNDILSRLDKPEAEVQIDRLITGR
LQSLQTYVTQQLIRAAEIRASANLAATKMSECVLGQSKRVDFCGKGYHLM
SFPQSAPHGVVFLHVTYVPAQEKNFTTAPAICHDGKAHFPREGVFVSNGT
HWFVTQRNFYEPQIITTDNTFVSGNCDVVIGIVNNTVYDPLQPELDSFKE
ELDKYFKNHTSPDVDLGDISGINASVVNIQKEIDRLNEVAKNLNESLIDL
QELGKYEQYIKWPWYIWLGFIAGLIAIVMVTIMLCCMTSCCSCLKGCCSC
GSCCKFDEDDSEPVLKGVKLHYT

[0183] SEQ ID NO 55: SEQ ID NO 6 + D614N + A892P + A942P + T941G + A944P + V987P

MFVFLVLLPLVSSQCVNLTTRTQLPPAYTNSFTRGVYYPDKVFRSSVLHS
TQDLFLPFFSNVTWFHAIHVSGTNGTKRFDNPVLPFNDGVYFASTEKSNI
IRGWIFGTTLDSKTQSLLIVNNATNVVIKVCEFQFCNDPFLGVYYHKNNK
SWMESEFRVYSSANNCTFEYVSQPFLMDLEGKQGNFKNLREFVFKNIDGY
FKIYSKHTPINLVRDLPQGFSALEPLVDLPIGINITRFQTLLALHRSYLT
PGDSSSGWTAGAAAYYVGYLQPRTFLLKYNENGTITDAVDCALDPLSETK
CTLKSFTVEKGIYQTSNFRVQPTESIVRFPNITNLCPFGEVFNATRFASV
YAWNRKRISNCVADYSVLYNSASFSTFKCYGVSPTKLNDLCFTNVYADSF
VIRGDEVRQIAPGQTGKIADYNYKLPDDFTGCVIAWNSNNLDSKVGGNYN
YLYRLFRKSNLKPFERDISTEIYQAGSTPCNGVEGFNCYFPLQSYGFQPT
NGVGYQPYRVVVLSFELLHAPATVCGPKKSTNLVKNKCVNFNFNGLTGTG
VLTESNKKFLPFQQFGRDIADTTDAVRDPQTLEILDITPCSFGGVSVITP
GTNTSNQVAVLYQNVNCTEVPVAIHADQLTPTWRVYSTGSNVFQTRAGCL
IGAEHVNNSYECDIPIGAGICASYQTQTNSPSRAGSVASQSIIAYTMSLG
AENSVAYSNNSIAIPTNFTISVTTEILPVSMTKTSVDCTMYICGDSTECS
NLLLQYGSFCTQLNRALTGIAVEQDKNTQEVFAQVKQIYKTPPIKDFGGF
NFSQILPDPSKPSKRSFIEDLLFNKVTLADAGFIKQYGDCLGDIAARDLI
CAQKFNGLTVLPPLLTDEMIAQYTSALLAGTITSGWTFGAGPALQIPFAM
QMAYRFNGIGVTQNVLYENQKLIANQFNSAIGKIQDSLSSGPSPLGKLQD
VVNQNAQALNTLVKQLSSNFGAISSVLNDILSRLDKPEAEVQIDRLITGR
LQSLQTYVTQQLIRAAEIRASANLAATKMSECVLGQSKRVDFCGKGYHLM
SFPQSAPHGVVFLHVTYVPAQEKNFTTAPAICHDGKAHFPREGVFVSNGT
HWFVTQRNFYEPQIITTDNTFVSGNCDVVIGIVNNTVYDPLQPELDSFKE
ELDKYFKNHTSPDVDLGDISGINASVVNIQKEIDRLNEVAKNLNESLIDL
QELGKYEQYIKWPWYIWLGFIAGLIAIVMVTIMLCCMTSCCSCLKGCCSC
GSCCKFDEDDSEPVLKGVKLHYT

[0184] SEQ ID NO 56: SEQ ID NO 6 + D614N + A892P + A942P + S943G + A944P + V987P

MFVFLVLLPLVSSQCVNLTTRTQLPPAYTNSFTRGVYYPDKVFRSSVLHS
TQDLFLPFFSNVTWFHAIHVSGTNGTKRFDNPVLPFNDGVYFASTEKSNI
IRGWIFGTTLDSKTQSLLIVNNATNVVIKVCEFQFCNDPFLGVYYHKNNK
SWMESEFRVYSSANNCTFEYVSQPFLMDLEGKQGNFKNLREFVFKNIDGY
FKIYSKHTPINLVRDLPQGFSALEPLVDLPIGINITRFQTLLALHRSYLT
PGDSSSGWTAGAAAYYVGYLQPRTFLLKYNENGTITDAVDCALDPLSETK
CTLKSFTVEKGIYQTSNFRVQPTESIVRFPNITNLCPFGEVFNATRFASV
YAWNRKRISNCVADYSVLYNSASFSTFKCYGVSPTKLNDLCFTNVYADSF
VIRGDEVRQIAPGQTGKIADYNYKLPDDFTGCVIAWNSNNLDSKVGGNYN
YLYRLFRKSNLKPFERDISTEIYQAGSTPCNGVEGFNCYFPLQSYGFQPT
NGVGYQPYRVVVLSFELLHAPATVCGPKKSTNLVKNKCVNFNFNGLTGTG
VLTESNKKFLPFQQFGRDIADTTDAVRDPQTLEILDITPCSFGGVSVITP
GTNTSNQVAVLYQNVNCTEVPVAIHADQLTPTWRVYSTGSNVFQTRAGCL
IGAEHVNNSYECDIPIGAGICASYQTQTNSPSRAGSVASQSIIAYTMSLG
AENSVAYSNNSIAIPTNFTISVTTEILPVSMTKTSVDCTMYICGDSTECS
NLLLQYGSFCTQLNRALTGIAVEQDKNTQEVFAQVKQIYKTPPIKDFGGF
NFSQILPDPSKPSKRSFIEDLLFNKVTLADAGFIKQYGDCLGDIAARDLI
CAQKFNGLTVLPPLLTDEMIAQYTSALLAGTITSGWTFGAGPALQIPFAM
QMAYRFNGIGVTQNVLYENQKLIANQFNSAIGKIQDSLSSTPGPLGKLQD
VVNQNAQALNTLVKQLSSNFGAISSVLNDILSRLDKPEAEVQIDRLITGR
LQSLQTYVTQQLIRAAEIRASANLAATKMSECVLGQSKRVDFCGKGYHLM
SFPQSAPHGVVFLHVTYVPAQEKNFTTAPAICHDGKAHFPREGVFVSNGT
HWFVTQRNFYEPQIITTDNTFVSGNCDVVIGIVNNTVYDPLQPELDSFKE
ELDKYFKNHTSPDVDLGDISGINASVVNIQKEIDRLNEVAKNLNESLIDL
QELGKYEQYIKWPWYIWLGFIAGLIAIVMVTIMLCCMTSCCSCLKGCCSC
GSCCKFDEDDSEPVLKGVKLHYT

[0185] SEQ ID NO 57: SEQ ID NO 6 + T941G + K986P + V987P

MFVFLVLLPLVSSQCVNLTTRTQLPPAYTNSFTRGVYYPDKVFRSSVLHS
TQDLFLPFFSNVTWFHAIHVSGTNGTKRFDNPVLPFNDGVYFASTEKSNI
IRGWIFGTTLDSKTQSLLIVNNATNVVIKVCEFQFCNDPFLGVYYHKNNK
SWMESEFRVYSSANNCTFEYVSQPFLMDLEGKQGNFKNLREFVFKNIDGY
FKIYSKHTPINLVRDLPQGFSALEPLVDLPIGINITRFQTLLALHRSYLT
PGDSSSGWTAGAAAYYVGYLQPRTFLLKYNENGTITDAVDCALDPLSETK
CTLKSFTVEKGIYQTSNFRVQPTESIVRFPNITNLCPFGEVFNATRFASV
YAWNRKRISNCVADYSVLYNSASFSTFKCYGVSPTKLNDLCFTNVYADSF
VIRGDEVRQIAPGQTGKIADYNYKLPDDFTGCVIAWNSNNLDSKVGGNYN
YLYRLFRKSNLKPFERDISTEIYQAGSTPCNGVEGFNCYFPLQSYGFQPT
NGVGYQPYRVVVLSFELLHAPATVCGPKKSTNLVKNKCVNFNFNGLTGTG
VLTESNKKFLPFQQFGRDIADTTDAVRDPQTLEILDITPCSFGGVSVITP
GTNTSNQVAVLYQDVNCTEVPVAIHADQLTPTWRVYSTGSNVFQTRAGCL
IGAEHVNNSYECDIPIGAGICASYQTQTNSPSRAGSVASQSIIAYTMSLG
AENSVAYSNNSIAIPTNFTISVTTEILPVSMTKTSVDCTMYICGDSTECS
NLLLQYGSFCTQLNRALTGIAVEQDKNTQEVFAQVKQIYKTPPIKDFGGF
NFSQILPDPSKPSKRSFIEDLLFNKVTLADAGFIKQYGDCLGDIAARDLI
CAQKFNGLTVLPPLLTDEMIAQYTSALLAGTITSGWTFGAGAALQIPFAM
QMAYRFNGIGVTQNVLYENQKLIANQFNSAIGKIQDSLSSGASALGKLQD
VVNQNAQALNTLVKQLSSNFGAISSVLNDILSRLDPPEAEVQIDRLITGR
LQSLQTYVTQQLIRAAEIRASANLAATKMSECVLGQSKRVDFCGKGYHLM
SFPQSAPHGVVFLHVTYVPAQEKNFTTAPAICHDGKAHFPREGVFVSNGT
HWFVTQRNFYEPQIITTDNTFVSGNCDVVIGIVNNTVYDPLQPELDSFKE
ELDKYFKNHTSPDVDLGDISGINASVVNIQKEIDRLNEVAKNLNESLIDL
QELGKYEQYIKWPWYIWLGFIAGLIAIVMVTIMLCCMTSCCSCLKGCCSC
GSCCKFDEDDSEPVLKGVKLHYT

[0186] SEQ ID NO 58: SEQ ID NO 6 + S943G + K986P + V987P

MFVFLVLLPLVSSQCVNLTTRTQLPPAYTNSFTRGVYYPDKVFRSSVLHS
TQDLFLPFFSNVTWFHAIHVSGTNGTKRFDNPVLPFNDGVYFASTEKSNI
IRGWIFGTTLDSKTQSLLIVNNATNVVIKVCEFQFCNDPFLGVYYHKNNK
SWMESEFRVYSSANNCTFEYVSQPFLMDLEGKQGNFKNLREFVFKNIDGY
FKIYSKHTPINLVRDLPQGFSALEPLVDLPIGINITRFQTLLALHRSYLT
PGDSSSGWTAGAAAYYVGYLQPRTFLLKYNENGTITDAVDCALDPLSETK
CTLKSFTVEKGIYQTSNFRVQPTESIVRFPNITNLCPFGEVFNATRFASV
YAWNRKRISNCVADYSVLYNSASFSTFKCYGVSPTKLNDLCFTNVYADSF
VIRGDEVRQIAPGQTGKIADYNYKLPDDFTGCVIAWNSNNLDSKVGGNYN
YLYRLFRKSNLKPFERDISTEIYQAGSTPCNGVEGFNCYFPLQSYGFQPT
NGVGYQPYRVVVLSFELLHAPATVCGPKKSTNLVKNKCVNFNFNGLTGTG
VLTESNKKFLPFQQFGRDIADTTDAVRDPQTLEILDITPCSFGGVSVITP
GTNTSNQVAVLYQDVNCTEVPVAIHADQLTPTWRVYSTGSNVFQTRAGCL
IGAEHVNNSYECDIPIGAGICASYQTQTNSPSRAGSVASQSIIAYTMSLG
AENSVAYSNNSIAIPTNFTISVTTEILPVSMTKTSVDCTMYICGDSTECS
NLLLQYGSFCTQLNRALTGIAVEQDKNTQEVFAQVKQIYKTPPIKDFGGF
NFSQILPDPSKPSKRSFIEDLLFNKVTLADAGFIKQYGDCLGDIAARDLI
CAQKFNGLTVLPPLLTDEMIAQYTSALLAGTITSGWTFGAGAALQIPFAM
QMAYRFNGIGVTQNVLYENQKLIANQFNSAIGKIQDSLSSTAGALGKLQD
VVNQNAQALNTLVKQLSSNFGAISSVLNDILSRLDPPEAEVQIDRLITGR
LQSLQTYVTQQLIRAAEIRASANLAATKMSECVLGQSKRVDFCGKGYHLM
SFPQSAPHGVVFLHVTYVPAQEKNFTTAPAICHDGKAHFPREGVFVSNGT
HWFVTQRNFYEPQIITTDNTFVSGNCDVVIGIVNNTVYDPLQPELDSFKE
ELDKYFKNHTSPDVDLGDISGINASVVNIQKEIDRLNEVAKNLNESLIDL
QELGKYEQYIKWPWYIWLGFIAGLIAIVMVTIMLCCMTSCCSCLKGCCSC
GSCCKFDEDDSEPVLKGVKLHYT

[0187] SEQ ID NO 59: SEQ ID NO 6 + D614N + A892P + A942P + T941G + K986P + V987P

MFVFLVLLPLVSSQCVNLTTRTQLPPAYTNSFTRGVYYPDKVFRSSVLHS
TQDLFLPFFSNVTWFHAIHVSGTNGTKRFDNPVLPFNDGVYFASTEKSNI
IRGWIFGTTLDSKTQSLLIVNNATNVVIKVCEFQFCNDPFLGVYYHKNNK
SWMESEFRVYSSANNCTFEYVSQQPFLMDLEGKQGNFKNLREFVFKNIDG
YFKIYSKHTPINLVRDLPQGFSALEPLVDLPIGINITRFQTLLALHRSYL
TPGDSSSGWTAGAAAYYVGYLQPRTFLLKYNENGTITDAVDCALDPLSET
KCTLKSFTVEKGIYQTSNFRVQPTESIVRFPNITNLCPFGEVFNATRFAS
VYAWNRKRISNCVADYSVLYNSASFSTFKCYGVSPTKLNDLCFTNVYADS
FVIRGDEVRQIAPGQTGKIADYNYKLPDDFTGCVIAWNSNNLDSKVGGNY
NYLYRLFRKSNLKPFERDISTEIYQAGSTPCNGVEGFNCYFPLQSYGFQP
TNGVGYQPYRVVVLSFELLHAPATVCGPKKSTNLVKNKCVNFNFNGLTGT
GVLTESNKKFLPFQQFGRDIADTTDAVRDPQTLEILDITPCSFGGVSVIT
PGTNTSNQVAVLYQNVNCTEVPVAIHADQLTPTWRVYSTGSNVFQTRAGC
LIGAEHVNNSYECDIPIGAGICASYQTQTNSPSRAGSVASQSIIAYTMSL
GAENSVAYSNNSIAIPTNFTISVTTEILPVSMTKTSVDCTMYICGDSTEC
SNLLLQYGSFCTQLNRALTGIAVEQDKNTQEVFAQVKQIYKTPPIKDFGG
FNFSQILPDPSKPSKRSFIEDLLFNKVTLADAGFIKQYGDCLGDIAARDL
ICAQKFNGLTVLPPLLTDEMIAQYTSALLAGTITSGWTFGAGPALQIPFA
MQMAYRFNGIGVTQNVLYENQKLIANQFNSAIGKIQDSLSSGPSALGKLQ
DVVNQNAQALNTLVKQLSSNFGAISSVLNDILSRLDPPEAEVQIDRLITG
RLQSLQTYVTQQLIRAAEIRASANLAATKMSECVLGQSKRVDFCGKGYHL
MSFPQSAPHGVVFLHVTYVPAQEKNFTTAPAICHDGKAHFPREGVFVSNG
THWFVTQRNFYEPQIITTDNTFVSGNCDVVIGIVNNTVYDPLQPELDSFK
EELDKYFKNHTSPDVDLGDISGINASVVNIQKEIDRLNEVAKNLNESLID
LQELGKYEQYIKWPWYIWLGFIAGLIAIVMVTIMLCCMTSCCSCLKGCCS
CGSCCKFDEDDSEPVLKGVKLHYT

[0188] SEQ ID NO 60: SEQ ID NO 6 + D614N + A892P + A942P + S943G + K986P + V987P

MFVFLVLLPLVSSQCVNLTTRTQLPPAYTNSFTRGVYYPDKVFRSSVLHS
TQDLFLPFFSNVTWFHAIHVSGTNGTKRFDNPVLPFNDGVYFASTEKSNI
IRGWIFGTTLDSKTQSLLIVNNATNVVIKVCEFQFCNDPFLGVYYHKNNK
SWMESEFRVYSSANNCTFEYVSQPFLMDLEGKQGNFKNLREFVFKNIDGY
FKIYSKHTPINLVRDLPQGFSALEPLVDLPIGINITRFQTLLALHRSYLT
PGDSSSGWTAGAAAYYVGYLQPRTFLLKYNENGTITDAVDCALDPLSETK
CTLKSFTVEKGIYQTSNFRVQPTESIVRFPNITNLCPFGEVFNATRFASV
YAWNRKRISNCVADYSVLYNSASFSTFKCYGVSPTKLNDLCFTNVYADSF
VIRGDEVRQIAPGQTGKIADYNYKLPDDFTGCVIAWNSNNLDSKVGGNYN
YLYRLFRKSNLKPFERDISTEIYQAGSTPCNGVEGFNCYFPLQSYGFQPT
NGVGYQPYRVVVLSFELLHAPATVCGPKKSTNLVKNKCVNFNFNGLTGTG
VLTESNKKFLPFQQFGRDIADTTDAVRDPQTLEILDITPCSFGGVSVITP
GTNTSNQVAVLYQNVNCTEVPVAIHADQLTPTWRVYSTGSNVFQTRAGCL
IGAEHVNNSYECDIPIGAGICASYQTQTNSPSRAGSVASQSIIAYTMSLG
AENSVAYSNNSIAIPTNFTISVTTEILPVSMTKTSVDCTMYICGDSTECS
NLLLQYGSFCTQLNRALTGIAVEQDKNTQEVFAQVKQIYKTPPIKDFGGF
NFSQILPDPSKPSKRSFIEDLLFNKVTLADAGFIKQYGDCLGDIAARDLI
CAQKFNGLTVLPPLLTDEMIAQYTSALLAGTITSGWTFGAGPALQIPFAM
QMAYRFNGIGVTQNVLYENQKLIANQFNSAIGKIQDSLSSTPGALGKLQD
VVNQNAQALNTLVKQLSSNFGAISSVLNDILSRLDPPEAEVQIDRLITGR
LQSLQTYVTQQLIRAAEIRASANLAATKMSECVLGQSKRVDFCGKGYHLM
SFPQSAPHGVVFLHVTYVPAQEKNFTTAPAICHDGKAHFPREGVFVSNGT
HWFVTQRNFYEPQIITTDNTFVSGNCDVVIGIVNNTVYDPLQPELDSFKE
ELDKYFKNHTSPDVDLGDISGINASVVNIQKEIDRLNEVAKNLNESLIDL
QELGKYEQYIKWPWYIWLGFIAGLIAIVMVTIMLCCMTSCCSCLKGCCSC
GSCCKFDEDDSEPVLKGVKLHYT

[0189] SEQ ID NO 61: SEQ ID NO 6 + D614N + A892P + A942P + T941G + S943G + K986P + V987P

MFVFLVLLPLVSSQCVNLTTRTQLPPAYTNSFTRGVYYPDKVFRSSVLHS
TQDLFLPFFSNVTWFHAIHVSGTNGTKRFDNPVLPFNDGVYFASTEKSNI
IRGWIFGTTLDSKTQSLLIVNNATNVVIKVCEFQFCNDPFLGVYYHKNNK
SWMESEFRVYSSANNCTFEYVSQPFLMDLEGKQGNFKNLREFVFKNIDGY
FKIYSKHTPINLVRDLPQGFSALEPLVDLPIGINITRFQTLLALHRSYLT
PGDSSSGWTAGAAAYYVGYLQPRTFLLKYNENGTITDAVDCALDPLSETK
CTLKSFTVEKGIYQTSNFRVQPTESIVRFPNITNLCPFGEVFNATRFASV
YAWNRKRISNCVADYSVLYNSASFSTFKCYGVSPTKLNDLCFTNVYADSF
VIRGDEVRQIAPGQTGKIADYNYKLPDDFTGCVIAWNSNNLDSKVGGNYN
YLYRLFRKSNLKPFERDISTEIYQAGSTPCNGVEGFNCYFPLQSYGFQPT
NGVGYQPYRVVVLSFELLHAPATVCGPKKSTNLVKNKCVNFNFNGLTGTG
VLTESNKKFLPFQQFGRDIADTTDAVRDPQTLEILDITPCSFGGVSVITP
GTNTSNQVAVLYQNVNCTEVPVAIHADQLTPTWRVYSTGSNVFQTRAGCL
IGAEHVNNSYECDIPIGAGICASYQTQTNSPSRAGSVASQSIIAYTMSLG
AENSVAYSNNSIAIPTNFTISVTTEILPVSMTKTSVDCTMYICGDSTECS
NLLLQYGSFCTQLNRALTGIAVEQDKNTQEVFAQVKQIYKTPPIKDFGGF
NFSQILPDPSKPSKRSFIEDLLFNKVTLADAGFIKQYGDCLGDIAARDLI
CAQKFNGLTVLPPLLTDEMIAQYTSALLAGTITSGWTFGAGPALQIPFAM
QMAYRFNGIGVTQNVLYENQKLIANQFNSAIGKIQDSLSSGPGALGKLOD
VVNQNAQALNTLVKQLSSNFGAISSVLNDILSRLDPPEAEVQIDRLITGR
LQSLQTYVTQQLIRAAEIRASANLAATKMSECVLGQSKRVDFCGKGYHLM
SFPQSAPHGVVFLHVTYVPAQEKNFTTAPAICHDGKAHFPREGVFVSNGT
HWFVTQRNFYEPQIITTDNTFVSGNCDVVIGIVNNTVYDPLQPELDSFKE
ELDKYFKNHTSPDVDLGDISGINASVVNIQKEIDRLNEVAKNLNESLIDL
QELGKYEQYIKWPWYIWLGFIAGLIAIVMVTIMLCCMTSCCSCLKGCCSC
GSCCKFDEDDSEPVLKGVKLHYT

[0190] SEQ ID NO 62: SEQ ID NO 6 + D614N + A892P + A942P + T941G + A944P + K986P + V987P

MFVFLVLLPLVSSQCVNLTTRTQLPPAYTNSFTRGVYYPDKVFRSSVLHS
TQDLFLPFFSNVTWFHAIHVSGTNGTKRFDNPVLPFNDGVYFASTEKSNI
IRGWIFGTTLDSKTQSLLIVNNATNVVIKVCEFQFCNDPFLGVYYHKNNK
SWMESEFRVYSSANNCTFEYVSQPFLMDLEGKQGNFKNLREFVFKNIDGY
FKIYSKHTPINLVRDLPQGFSALEPLVDLPIGINITRFQTLLALHRSYLT
PGDSSSGWTAGAAAYYVGYLQPRTFLLKYNENGTITDAVDCALDPLSETK
CTLKSFTVEKGIYQTSNFRVQPTESIVRFPNITNLCPFGEVFNATRFASV
YAWNRKRISNCVADYSVLYNSASFSTFKCYGVSPTKLNDLCFTNVYADSF
VIRGDEVRQIAPGQTGKIADYNYKLPDDFTGCVIAWNSNNLDSKVGGNYN
YLYRLFRKSNLKPFERDISTEIYQAGSTPCNGVEGFNCYFPLQSYGFQPT
NGVGYQPYRVVVLSFELLHAPATVCGPKKSTNLVKNKCVNFNFNGLTGTG
VLTESNKKFLPFQQFGRDIADTTDAVRDPQTLEILDITPCSFGGVSVITP
GTNTSNQVAVLYQNVNCTEVPVAIHADQLTPTWRVYSTGSNVFQTRAGCL
IGAEHVNNSYECDIPIGAGICASYQTQTNSPSRAGSVASQSIIAYTMSLG
AENSVAYSNNSIAIPTNFTISVTTEILPVSMTKTSVDCTMYICGDSTECS
NLLLQYGSFCTQLNRALTGIAVEQDKNTQEVFAQVKQIYKTPPIKDFGGF
NFSQILPDPSKPSKRSFIEDLLFNKVTLADAGFIKQYGDCLGDIAARDLI
CAQKFNGLTVLPPLLTDEMIAQYTSALLAGTITSGWTFGAGPALQIPFAM
QMAYRFNGIGVTQNVLYENQKLIANQFNSAIGKIQDSLSSGPSPLGKLQD
VVNQNAQALNTLVKQLSSNFGAISSVLNDILSRLDPPEAEVQIDRLITGR
LQSLQTYVTQQLIRAAEIRASANLAATKMSECVLGQSKRVDFCGKGYHLM
SFPQSAPHGVVFLHVTYVPAQEKNFTTAPAICHDGKAHFPREGVFVSNGT
HWFVTQRNFYEPQIITTDNTFVSGNCDVVIGIVNNTVYDPLQPELDSFKE
ELDKYFKNHTSPDVDLGDISGINASVVNIQKEIDRLNEVAKNLNESLIDL
QELGKYEQYIKWPWYIWLGFIAGLIAIVMVTIMLCCMTSCCSCLKGCCSC
GSCCKFDEDDSEPVLKGVKLHYT

[0191] SEQ ID NO 63: SEQ ID NO 6 + D614N + A892P + A942P + S943G + A944P + K986P + V987P

MFVFLVLLPLVSSQCVNLTTRTQLPPAYTNSFTRGVYYPDKVFRSSVLHS
TQDLFLPFFSNVTWFHAIHVSGTNGTKRFDNPVLPFNDGVYFASTEKSNI
IRGWIFGTTLDSKTQSLLIVNNATNVVIKVCEFQFCNDPFLGVYYHKNNK
SWMESEFRVYSSANNCTFEYVSQPFLMDLEGKQGNFKNLREFVFKNIDGY
FKIYSKHTPINLVRDLPQGFSALEPLVDLPIGINITRFQTLLALHRSYLT
PGDSSSGWTAGAAAYYVGYLQPRTFLLKYNENGTITDAVDCALDPLSETK
CTLKSFTVEKGIYQTSNFRVQPTESIVRFPNITNLCPFGEVFNATRFASV
YAWNRKRISNCVADYSVLYNSASFSTFKCYGVSPTKLNDLCFTNVYADSF
VIRGDEVRQIAPGQTGKIADYNYKLPDDFTGCVIAWNSNNLDSKVGGNYN
YLYRLFRKSNLKPFERDISTEIYQAGSTPCNGVEGFNCYFPLQSYGFQPT
NGVGYQPYRVVVLSFELLHAPATVCGPKKSTNLVKNKCVNFNFNGLTGTG
VLTESNKKFLPFQQFGRDIADTTDAVRDPQTLEILDITPCSFGGVSVITP
GTNTSNQVAVLYQNVNCTEVPVAIHADQLTPTWRVYSTGSNVFQTRAGCL
IGAEHVNNSYECDIPIGAGICASYQTQTNSPSRAGSVASQSIIAYTMSLG
AENSVAYSNNSIAIPTNFTISVTTEILPVSMTKTSVDCTMYICGDSTECS
NLLLQYGSFCTQLNRALTGIAVEQDKNTQEVFAQVKQIYKTPPIKDFGGF
NFSQILPDPSKPSKRSFIEDLLFNKVTLADAGFIKQYGDCLGDIAARDLI
CAQKFNGLTVLPPLLTDEMIAQYTSALLAGTITSGWTFGAGPALQIPFAM
QMAYRFNGIGVTQNVLYENQKLIANQFNSAIGKIQDSLSSTPGPLGKLQD
VVNQNAQALNTLVKQLSSNFGAISSVLNDILSRLDPPEAEVQIDRLITGR
LQSLQTYVTQQLIRAAEIRASANLAATKMSECVLGQSKRVDFCGKGYHLM
SFPQSAPHGVVFLHVTYVPAQEKNFTTAPAICHDGKAHFPREGVFVSNGT
HWFVTQRNFYEPQIITTDNTFVSGNCDVVIGIVNNTVYDPLQPELDSFKE
ELDKYFKNHTSPDVDLGDISGINASVVNIQKEIDRLNEVAKNLNESLIDL
QELGKYEQYIKWPWYIWLGFIAGLIAIVMVTIMLCCMTSCCSCLKGCCSC
GSCCKFDEDDSEPVLKGVKLHYT

[0192] SEQ ID NO 64: SEQ ID NO 5 + T941G

MFVFLVLLPLVSSQCVNLTTRTQLPPAYTNSFTRGVYYPDKVFRSSVLHS
TQDLFLPFFSNVTWFHAIHVSGTNGTKRFDNPVLPFNDGVYFASTEKSNI
IRGWIFGTTLDSKTQSLLIVNNATNVVIKVCEFQFCNDPFLGVYYHKNNK
SWMESEFRVYSSANNCTFEYVSQPFLMDLEGKQGNFKNLREFVFKNIDGY
FKIYSKHTPINLVRDLPQGFSALEPLVDLPIGINITRFQTLLALHRSYLT
PGDSSSGWTAGAAAYYVGYLQPRTFLLKYNENGTITDAVDCALDPLSETK
CTLKSFTVEKGIYQTSNFRVQPTESIVRFPNITNLCPFGEVFNATRFASV
YAWNRKRISNCVADYSVLYNSASFSTFKCYGVSPTKLNDLCFTNVYADSF
VIRGDEVRQIAPGQTGKIADYNYKLPDDFTGCVIAWNSNNLDSKVGGNYN
YLYRLFRKSNLKPFERDISTEIYQAGSTPCNGVEGFNCYFPLQSYGFQPT
NGVGYQPYRVVVLSFELLHAPATVCGPKKSTNLVKNKCVNFNFNGLTGTG
VLTESNKKFLPFQQFGRDIADTTDAVRDPQTLEILDITPCSFGGVSVITP
GTNTSNQVAVLYQDVNCTEVPVAIHADQLTPTWRVYSTGSNVFQTRAGCL
IGAEHVNNSYECDIPIGAGICASYQTQTNSPRRARSVASQSIIAYTMSLG
AENSVAYSNNSIAIPTNFTISVTTEILPVSMTKTSVDCTMYICGDSTECS
NLLLQYGSFCTQLNRALTGIAVEQDKNTQEVFAQVKQIYKTPPIKDFGGF
NFSQILPDPSKPSKRSFIEDLLFNKVTLADAGFIKQYGDCLGDIAARDLI
CAQKFNGLTVLPPLLTDEMIAQYTSALLAGTITSGWTFGAGAALQIPFAM
QMAYRFNGIGVTQNVLYENQKLIANQFNSAIGKIQDSLSSGASALGKLQD
VVNQNAQALNTLVKQLSSNFGAISSVLNDILSRLDKVEAEVQIDRLITGR
LQSLQTYVTQQLIRAAEIRASANLAATKMSECVLGQSKRVDFCGKGYHLM
SFPQSAPHGVVFLHVTYVPAQEKNFTTAPAICHDGKAHFPREGVFVSNGT
HWFVTQRNFYEPQIITTDNTFVSGNCDVVIGIVNNTVYDPLQPELDSFKE
ELDKYFKNHTSPDVDLGDISGINASVVNIQKEIDRLNEVAKNLNESLIDL
QELGKYEQ

[0193] SEQ ID NO 65: SEQ ID NO 5 + S943G

MFVFLVLLPLVSSQCVNLTTRTQLPPAYTNSFTRGVYYPDKVFRSSVLHS
TQDLFLPFFSNVTWFHAIHVSGTNGTKRFDNPVLPFNDGVYFASTEKSNI
IRGWIFGTTLDSKTQSLLIVNNATNVVIKVCEFQFCNDPFLGVYYHKNNK
SWMESEFRVYSSANNCTFEYVSQPFLMDLEGKQGNFKNLREFVFKNIDGY
FKIYSKHTPINLVRDLPQGFSALEPLVDLPIGINITRFQTLLALHRSYLT
PGDSSSGWTAGAAAYYVGYLQPRTFLLKYNENGTITDAVDCALDPLSETK
CTLKSFTVEKGIYQTSNFRVQPTESIVRFPNITNLCPFGEVFNATRFASV
YAWNRKRISNCVADYSVLYNSASFSTFKCYGVSPTKLNDLCFTNVYADSF
VIRGDEVRQIAPGQTGKIADYNYKLPDDFTGCVIAWNSNNLDSKVGGNYN
YLYRLFRKSNLKPFERDISTEIYQAGSTPCNGVEGFNCYFPLQSYGFQPT
NGVGYQPYRVVVLSFELLHAPATVCGPKKSTNLVKNKCVNFNFNGLTGTG
VLTESNKKFLPFQQFGRDIADTTDAVRDPQTLEILDITPCSFGGVSVITP
GTNTSNQVAVLYQDVNCTEVPVAIHADQLTPTWRVYSTGSNVFQTRAGCL
IGAEHVNNSYECDIPIGAGICASYQTQTNSPRRARSVASQSIIAYTMSLG
AENSVAYSNNSIAIPTNFTISVTTEILPVSMTKTSVDCTMYICGDSTECS
NLLLQYGSFCTQLNRALTGIAVEQDKNTQEVFAQVKQIYKTPPIKDFGGF
NFSQILPDPSKPSKRSFIEDLLFNKVTLADAGFIKQYGDCLGDIAARDLI
CAQKFNGLTVLPPLLTDEMIAQYTSALLAGTITSGWTFGAGAALQIPFAM
QMAYRFNGIGVTQNVLYENQKLIANQFNSAIGKIQDSLSSTAGALGKLQD
VVNQNAQALNTLVKQLSSNFGAISSVLNDILSRLDKVEAEVQIDRLITGR
LQSLQTYVTQQLIRAAEIRASANLAATKMSECVLGQSKRVDFCGKGYHLM
SFPQSAPHGVVFLHVTYVPAQEKNFTTAPAICHDGKAHFPREGVFVSNGT
HWFVTQRNFYEPQIITTDNTFVSGNCDVVIGIVNNTVYDPLQPELDSFKE
ELDKYFKNHTSPDVDLGDISGINASVVNIQKEIDRLNEVAKNLNESLIDL
QELGKYEQ

[0194] SEQ ID NO 66: SEQ ID NO 5 + D614N + A892P + A942P + T941G

MFVFLVLLPLVSSQCVNLTTRTQLPPAYTNSFTRGVYYPDKVFRSSVLHS
TQDLFLPFFSNVTWFHAIHVSGTNGTKRFDNPVLPFNDGVYFASTEKSNI
IRGWIFGTTLDSKTQSLLIVNNATNVVIKVCEFQFCNDPFLGVYYHKNNK
SWMESEFRVYSSANNCTFEYVSQPFLMDLEGKQGNFKNLREFVFKNIDGY
FKIYSKHTPINLVRDLPQGFSALEPLVDLPIGINITRFQTLLALHRSYLT
PGDSSSGWTAGAAAYYVGYLQPRTFLLKYNENGTITDAVDCALDPLSETK
CTLKSFTVEKGIYQTSNFRVQPTESIVRFPNITNLCPFGEVFNATRFASV
YAWNRKRISNCVADYSVLYNSASFSTFKCYGVSPTKLNDLCFTNVYADSF
VIRGDEVRQIAPGQTGKIADYNYKLPDDFTGCVIAWNSNNLDSKVGGNYN
YLYRLFRKSNLKPFERDISTEIYQAGSTPCNGVEGFNCYFPLQSYGFQPT
NGVGYQPYRVVVLSFELLHAPATVCGPKKSTNLVKNKCVNFNFNGLTGTG
VLTESNKKFLPFQQFGRDIADTTDAVRDPQTLEILDITPCSFGGVSVITP
GTNTSNQVAVLYQNVNCTEVPVAIHADQLTPTWRVYSTGSNVFQTRAGCL
IGAEHVNNSYECDIPIGAGICASYQTQTNSPRRARSVASQSIIAYTMSLG
AENSVAYSNNSIAIPTNFTISVTTEILPVSMTKTSVDCTMYICGDSTECS
NLLLQYGSFCTQLNRALTGIAVEQDKNTQEVFAQVKQIYKTPPIKDFGGF
NFSQILPDPSKPSKRSFIEDLLFNKVTLADAGFIKQYGDCLGDIAARDLI
CAQKFNGLTVLPPLLTDEMIAQYTSALLAGTITSGWTFGAGPALQIPFAM
QMAYRFNGIGVTQNVLYENQKLIANQFNSAIGKIQDSLSSGPSALGKLQD
VVNQNAQALNTLVKQLSSNFGAISSVLNDILSRLDKVEAEVQIDRLITGR
LQSLQTYVTQQLIRAAEIRASANLAATKMSECVLGQSKRVDFCGKGYHLM
SFPQSAPHGVVFLHVTYVPAQEKNFTTAPAICHDGKAHFPREGVFVSNGT
HWFVTQRNFYEPQIITTDNTFVSGNCDVVIGIVNNTVYDPLQPELDSFKE
ELDKYFKNHTSPDVDLGDISGINASVVNIQKEIDRLNEVAKNLNESLIDL
QELGKYEQ

[0195] SEQ ID NO 67: SEQ ID NO 5 + D614N + A892P + A942P + S943G

MFVFLVLLPLVSSQCVNLTTRTQLPPAYTNSFTRGVYYPDKVFRSSVLHS
TQDLFLPFFSNVTWFHAIHVSGTNGTKRFDNPVLPFNDGVYFASTEKSNI
IRGWIFGTTLDSKTQSLLIVNNATNVVIKVCEFQFCNDPFLGVYYHKNNK
SWMESEFRVYSSANNCTFEYVSQPFLMDLEGKQGNFKNLREFVFKNIDGY
FKIYSKHTPINLVRDLPQGFSALEPLVDLPIGINITRFQTLLALHRSYLT
PGDSSSGWTAGAAAYYVGYLQPRTFLLKYNENGTITDAVDCALDPLSETK
CTLKSFTVEKGIYQTSNFRVQPTESIVRFPNITNLCPFGEVFNATRFASV
YAWNRKRISNCVADYSVLYNSASFSTFKCYGVSPTKLNDLCFTNVYADSF
VIRGDEVRQIAPGQTGKIADYNYKLPDDFTGCVIAWNSNNLDSKVGGNYN
YLYRLFRKSNLKPFERDISTEIYQAGSTPCNGVEGFNCYFPLQSYGFQPT
NGVGYQPYRVVVLSFELLHAPATVCGPKKSTNLVKNKCVNFNFNGLTGTG
VLTESNKKFLPFQQFGRDIADTTDAVRDPQTLEILDITPCSFGGVSVITP
GTNTSNQVAVLYQNVNCTEVPVAIHADQLTPTWRVYSTGSNVFQTRAGCL
IGAEHVNNSYECDIPIGAGICASYQTQTNSPRRARSVASQSIIAYTMSLG
AENSVAYSNNSIAIPTNFTISVTTEILPVSMTKTSVDCTMYICGDSTECS
NLLLQYGSFCTQLNRALTGIAVEQDKNTQEVFAQVKQIYKTPPIKDFGGF
NFSQILPDPSKPSKRSFIEDLLFNKVTLADAGFIKQYGDCLGDIAARDLI
CAQKFNGLTVLPPLLTDEMIAQYTSALLAGTITSGWTFGAGPALQIPFAM
QMAYRFNGIGVTQNVLYENQKLIANQFNSAIGKIQDSLSSTPGALGKLQD
VVNQNAQALNTLVKQLSSNFGAISSVLNDILSRLDKVEAEVQIDRLITGR
LQSLQTYVTQQLIRAAEIRASANLAATKMSECVLGQSKRVDFCGKGYHLM
SFPQSAPHGVVFLHVTYVPAQEKNFTTAPAICHDGKAHFPREGVFVSNGT
HWFVTQRNFYEPQIITTDNTFVSGNCDVVIGIVNNTVYDPLQPELDSFKE
ELDKYFKNHTSPDVDLGDISGINASVVNIQKEIDRLNEVAKNLNESLIDL
QELGKYEQ

[0196] SEQ ID NO 68: SEQ ID NO 5 + D614N + A892P + A942P + T941G + S943G

MFVFLVLLPLVSSQCVNLTTRTQLPPAYTNSFTRGVYYPDKVFRSSVLHS
TQDLFLPFFSNVTWFHAIHVSGTNGTKRFDNPVLPFNDGVYFASTEKSNI
IRGWIFGTTLDSKTQSLLIVNNATNVVIKVCEFQFCNDPFLGVYYHKNNK
SWMESEFRVYSSANNCTFEYVSQPFLMDLEGKQGNFKNLREFVFKNIDGY
FKIYSKHTPINLVRDLPQGFSALEPLVDLPIGINITRFQTLLALHRSYLT
PGDSSSGWTAGAAAYYVGYLQPRTFLLKYNENGTITDAVDCALDPLSETK
CTLKSFTVEKGIYQTSNFRVQPTESIVRFPNITNLCPFGEVFNATRFASV
YAWNRKRISNCVADYSVLYNSASFSTFKCYGVSPTKLNDLCFTNVYADSF
VIRGDEVRQIAPGQTGKIADYNYKLPDDFTGCVIAWNSNNLDSKVGGNYN
YLYRLFRKSNLKPFERDISTEIYQAGSTPCNGVEGFNCYFPLQSYGFQPT
NGVGYQPYRVVVLSFELLHAPATVCGPKKSTNLVKNKCVNFNFNGLTGTG
VLTESNKKFLPFQQFGRDIADTTDAVRDPQTLEILDITPCSFGGVSVITP
GTNTSNQVAVLYQNVNCTEVPVAIHADQLTPTWRVYSTGSNVFQTRAGCL
IGAEHVNNSYECDIPIGAGICASYQTQTNSPRRARSVASQSIIAYTMSLG
AENSVAYSNNSIAIPTNFTISVTTEILPVSMTKTSVDCTMYICGDSTECS
NLLLQYGSFCTQLNRALTGIAVEQDKNTQEVFAQVKQIYKTPPIKDFGGF
NFSQILPDPSKPSKRSFIEDLLFNKVTLADAGFIKQYGDCLGDIAARDLI
CAQKFNGLTVLPPLLTDEMIAQYTSALLAGTITSGWTFGAGPALQIPFAM
QMAYRFNGIGVTQNVLYENQKLIANQFNSAIGKIQDSLSSGPGALGKLQD
VVNQNAQALNTLVKQLSSNFGAISSVLNDILSRLDKVEAEVQIDRLITGR
LQSLQTYVTQQLIRAAEIRASANLAATKMSECVLGQSKRVDFCGKGYHLM
SFPQSAPHGVVFLHVTYVPAQEKNFTTAPAICHDGKAHFPREGVFVSNGT
HWFVTQRNFYEPQIITTDNTFVSGNCDVVIGIVNNTVYDPLQPELDSFKE
ELDKYFKNHTSPDVDLGDISGINASVVNIQKEIDRLNEVAKNLNESLIDL
QELGKYEQ

[0197] SEQ ID NO 69: SEQ ID NO 5 + D614N + A892P + A942P + T941G + A944P

MFVFLVLLPLVSSQCVNLTTRTQLPPAYTNSFTRGVYYPDKVFRSSVLHS
TQDLFLPFFSNVTWFHAIHVSGTNGTKRFDNPVLPFNDGVYFASTEKSNI
IRGWIFGTTLDSKTQSLLIVNNATNVVIKVCEFQFCNDPFLGVYYHKNNK
SWMESEFRVYSSANNCTFEYVSQPFLMDLEGKQGNFKNLREFVFKNIDGY
FKIYSKHTPINLVRDLPQGFSALEPLVDLPIGINITRFQTLLALHRSYLT
PGDSSSGWTAGAAAYYVGYLQPRTFLLKYNENGTITDAVDCALDPLSETK
CTLKSFTVEKGIYQTSNFRVQPTESIVRFPNITNLCPFGEVFNATRFASV
YAWNRKRISNCVADYSVLYNSASFSTFKCYGVSPTKLNDLCFTNVYADSF
VIRGDEVRQIAPGQTGKIADYNYKLPDDFTGCVIAWNSNNLDSKVGGNYN
YLYRLFRKSNLKPFERDISTEIYQAGSTPCNGVEGFNCYFPLQSYGFQPT
NGVGYQPYRVVVLSFELLHAPATVCGPKKSTNLVKNKCVNFNFNGLTGTG
VLTESNKKFLPFQQFGRDIADTTDAVRDPQTLEILDITPCSFGGVSVITP
GTNTSNQVAVLYQNVNCTEVPVAIHADQLTPTWRVYSTGSNVFQTRAGCL
IGAEHVNNSYECDIPIGAGICASYQTQTNSPRRARSVASQSIIAYTMSLG
AENSVAYSNNSIAIPTNFTISVTTEILPVSMTKTSVDCTMYICGDSTECS
NLLLQYGSFCTQLNRALTGIAVEQDKNTQEVFAQVKQIYKTPPIKDFGGF
NFSQILPDPSKPSKRSFIEDLLFNKVTLADAGFIKQYGDCLGDIAARDLI
CAQKFNGLTVLPPLLTDEMIAQYTSALLAGTITSGWTFGAGPALQIPFAM
QMAYRFNGIGVTQNVLYENQKLIANQFNSAIGKIQDSLSSGPSPLGKLQD
VVNQNAQALNTLVKQLSSNFGAISSVLNDILSRLDKVEAEVQIDRLITGR
LQSLQTYVTQQLIRAAEIRASANLAATKMSECVLGQSKRVDFCGKGYHLM
SFPQSAPHGVVFLHVTYVPAQEKNFTTAPAICHDGKAHFPREGVFVSNGT
HWFVTQRNFYEPQIITTDNTFVSGNCDVVIGIVNNTVYDPLQPELDSFKE
ELDKYFKNHTSPDVDLGDISGINASVVNIQKEIDRLNEVAKNLNESLIDL
QELGKYEQ

[0198] SEQ ID NO 70: SEQ ID NO 5 + D614N + A892P + A942P + S943G + A944P

MFVFLVLLPLVSSQCVNLTTRTQLPPAYTNSFTRGVYYPDKVFRSSVLHS
TQDLFLPFFSNVTWFHAIHVSGTNGTKRFDNPVLPFNDGVYFASTEKSNI
IRGWIFGTTLDSKTQSLLIVNNATNVVIKVCEFQFCNDPFLGVYYHKNNK
SWMESEFRVYSSANNCTFEYVSQPFLMDLEGKQGNFKNLREFVFKNIDGY
FKIYSKHTPINLVRDLPQGFSALEPLVDLPIGINITRFQTLLALHRSYLT
PGDSSSGWTAGAAAYYVGYLQPRTFLLKYNENGTITDAVDCALDPLSETK
CTLKSFTVEKGIYQTSNFRVQPTESIVRFPNITNLCPFGEVFNATRFASV
YAWNRKRISNCVADYSVLYNSASFSTFKCYGVSPTKLNDLCFTNVYADSF
VIRGDEVRQIAPGQTGKIADYNYKLPDDFTGCVIAWNSNNLDSKVGGNYN
YLYRLFRKSNLKPFERDISTEIYQAGSTPCNGVEGFNCYFPLQSYGFQPT
NGVGYQPYRVVVLSFELLHAPATVCGPKKSTNLVKNKCVNFNFNGLTGTG
VLTESNKKFLPFQQFGRDIADTTDAVRDPQTLEILDITPCSFGGVSVITP
GTNTSNQVAVLYQNVNCTEVPVAIHADQLTPTWRVYSTGSNVFQTRAGCL
IGAEHVNNSYECDIPIGAGICASYQTQTNSPRRARSVASQSIIAYTMSLG
AENSVAYSNNSIAIPTNFTISVTTEILPVSMTKTSVDCTMYICGDSTECS
NLLLQYGSFCTQLNRALTGIAVEQDKNTQEVFAQVKQIYKTPPIKDFGGF
NFSQILPDPSKPSKRSFIEDLLFNKVTLADAGFIKQYGDCLGDIAARDLI
CAQKFNGLTVLPPLLTDEMIAQYTSALLAGTITSGWTFGAGPALQIPFAM
QMAYRFNGIGVTQNVLYENQKLIANQFNSAIGKIQDSLSSTPGPLGKLQD
VVNQNAQALNTLVKQLSSNFGAISSVLNDILSRLDKVEAEVQIDRLITGR
LQSLQTYVTQQLIRAAEIRASANLAATKMSECVLGQSKRVDFCGKGYHLM
SFPQSAPHGVVFLHVTYVPAQEKNFTTAPAICHDGKAHFPREGVFVSNGT
HWFVTQRNFYEPQIITTDNTFVSGNCDVVIGIVNNTVYDPLQPELDSFKE
ELDKYFKNHTSPDVDLGDISGINASVVNIQKEIDRLNEVAKNLNESLIDL
QELGKYEQ

[0199] SEQ ID NO 71: SEQ ID NO 5 + T941G + K986P

MFVFLVLLPLVSSQCVNLTTRTQLPPAYTNSFTRGVYYPDKVFRSSVLHS
TQDLFLPFFSNVTWFHAIHVSGTNGTKRFDNPVLPFNDGVYFASTEKSNI
IRGWIFGTTLDSKTQSLLIVNNATNVVIKVCEFQFCNDPFLGVYYHKNNK
SWMESEFRVYSSANNCTFEYVSQPFLMDLEGKQGNFKNLREFVFKNIDGY
FKIYSKHTPINLVRDLPQGFSALEPLVDLPIGINITRFQTLLALHRSYLT
PGDSSSGWTAGAAAYYVGYLQPRTFLLKYNENGTITDAVDCALDPLSETK
CTLKSFTVEKGIYQTSNFRVQPTESIVRFPNITNLCPFGEVFNATRFASV
YAWNRKRISNCVADYSVLYNSASFSTFKCYGVSPTKLNDLCFTNVYADSF
VIRGDEVRQIAPGQTGKIADYNYKLPDDFTGCVIAWNSNNLDSKVGGNYN
YLYRLFRKSNLKPFERDISTEIYQAGSTPCNGVEGFNCYFPLQSYGFQPT
NGVGYQPYRVVVLSFELLHAPATVCGPKKSTNLVKNKCVNFNFNGLTGTG
VLTESNKKFLPFQQFGRDIADTTDAVRDPQTLEILDITPCSFGGVSVITP
GTNTSNQVAVLYQDVNCTEVPVAIHADQLTPTWRVYSTGSNVFQTRAGCL
IGAEHVNNSYECDIPIGAGICASYQTQTNSPRRARSVASQSIIAYTMSLG
AENSVAYSNNSIAIPTNFTISVTTEILPVSMTKTSVDCTMYICGDSTECS
NLLLQYGSFCTQLNRALTGIAVEQDKNTQEVFAQVKQIYKTPPIKDFGGF
NFSQILPDPSKPSKRSFIEDLLFNKVTLADAGFIKQYGDCLGDIAARDLI
CAQKFNGLTVLPPLLTDEMIAQYTSALLAGTITSGWTFGAGAALQIPFAM
QMAYRFNGIGVTQNVLYENQKLIANQFNSAIGKIQDSLSSGASALGKLQD
VVNQNAQALNTLVKQLSSNFGAISSVLNDILSRLDPVEAEVQIDRLITGR
LQSLQTYVTQQLIRAAEIRASANLAATKMSECVLGQSKRVDFCGKGYHLM
SFPQSAPHGVVFLHVTYVPAQEKNFTTAPAICHDGKAHFPREGVFVSNGT
HWFVTQRNFYEPQIITTDNTFVSGNCDVVIGIVNNTVYDPLQPELDSFKE
ELDKYFKNHTSPDVDLGDISGINASVVNIQKEIDRLNEVAKNLNESLIDL
QELGKYEQ

[0200] SEQ ID NO 72: SEQ ID NO 5 + S943G + K986P

MFVFLVLLPLVSSQCVNLTTRTQLPPAYTNSFTRGVYYPDKVFRSSVLHS
TQDLFLPFFSNVTWFHAIHVSGTNGTKRFDNPVLPFNDGVYFASTEKSNI
IRGWIFGTTLDSKTQSLLIVNNATNVVIKVCEFQFCNDPFLGVYYHKNNK
SWMESEFRVYSSANNCTFEYVSQPFLMDLEGKQGNFKNLREFVFKNIDGY
FKIYSKHTPINLVRDLPQGFSALEPLVDLPIGINITRFQTLLALHRSYLT
PGDSSSGWTAGAAAYYVGYLQPRTFLLKYNENGTITDAVDCALDPLSETK
CTLKSFTVEKGIYQTSNFRVQPTESIVRFPNITNLCPFGEVFNATRFASV
YAWNRKRISNCVADYSVLYNSASFSTFKCYGVSPTKLNDLCFTNVYADSF
VIRGDEVRQIAPGQTGKIADYNYKLPDDFTGCVIAWNSNNLDSKVGGNYN
YLYRLFRKSNLKPFERDISTEIYQAGSTPCNGVEGFNCYFPLQSYGFQPT
NGVGYQPYRVVVLSFELLHAPATVCGPKKSTNLVKNKCVNFNFNGLTGTG
VLTESNKKFLPFQQFGRDIADTTDAVRDPQTLEILDITPCSFGGVSVITP
GTNTSNQVAVLYQDVNCTEVPVAIHADQLTPTWRVYSTGSNVFQTRAGCL
IGAEHVNNSYECDIPIGAGICASYQTQTNSPRRARSVASQSIIAYTMSLG
AENSVAYSNNSIAIPTNFTISVTTEILPVSMTKTSVDCTMYICGDSTECS
NLLLQYGSFCTQLNRALTGIAVEQDKNTQEVFAQVKQIYKTPPIKDFGGF
NFSQILPDPSKPSKRSFIEDLLFNKVTLADAGFIKQYGDCLGDIAARDLI
CAQKFNGLTVLPPLLTDEMIAQYTSALLAGTITSGWTFGAGAALQIPFAM
QMAYRFNGIGVTQNVLYENQKLIANQFNSAIGKIQDSLSSTAGALGKLQD
VVNQNAQALNTLVKQLSSNFGAISSVLNDILSRLDPVEAEVQIDRLITGR
LQSLQTYVTQQLIRAAEIRASANLAATKMSECVLGQSKRVDFCGKGYHLM
SFPQSAPHGVVFLHVTYVPAQEKNFTTAPAICHDGKAHFPREGVFVSNGT
HWFVTQRNFYEPQIITTDNTFVSGNCDVVIGIVNNTVYDPLQPELDSFKE
ELDKYFKNHTSPDVDLGDISGINASVVNIQKEIDRLNEVAKNLNESLIDL
QELGKYEQ

[0201] SEQ ID NO 73: SEQ ID NO 5 + D614N + A892P + A942P + T941G + K986P

MFVFLVLLPLVSSQCVNLTTRTQLPPAYTNSFTRGVYYPDKVFRSSVLHS
TQDLFLPFFSNVTWFHAIHVSGTNGTKRFDNPVLPFNDGVYFASTEKSNI
IRGWIFGTTLDSKTQSLLIVNNATNVVIKVCEFQFCNDPFLGVYYHKNNK
SWMESEFRVYSSANNCTFEYVSQPFLMDLEGKQGNFKNLREFVFKNIDGY
FKIYSKHTPINLVRDLPQGFSALEPLVDLPIGINITRFQTLLALHRSYLT
PGDSSSGWTAGAAAYYVGYLQPRTFLLKYNENGTITDAVDCALDPLSETK
CTLKSFTVEKGIYQTSNFRVQPTESIVRFPNITNLCPFGEVFNATRFASV
YAWNRKRISNCVADYSVLYNSASFSTFKCYGVSPTKLNDLCFTNVYADSF
VIRGDEVRQIAPGQTGKIADYNYKLPDDFTGCVIAWNSNNLDSKVGGNYN
YLYRLFRKSNLKPFERDISTEIYQAGSTPCNGVEGFNCYFPLQSYGFQPT
NGVGYQPYRVVVLSFELLHAPATVCGPKKSTNLVKNKCVNFNFNGLTGTG
VLTESNKKFLPFQQFGRDIADTTDAVRDPQTLEILDITPCSFGGVSVITP
GTNTSNQVAVLYQNVNCTEVPVAIHADQLTPTWRVYSTGSNVFQTRAGCL
IGAEHVNNSYECDIPIGAGICASYQTQTNSPRRARSVASQSIIAYTMSLG
AENSVAYSNNSIAIPTNFTISVTTEILPVSMTKTSVDCTMYICGDSTECS
NLLLQYGSFCTQLNRALTGIAVEQDKNTQEVFAQVKQIYKTPPIKDFGGF
NFSQILPDPSKPSKRSFIEDLLFNKVTLADAGFIKQYGDCLGDIAARDLI
CAQKFNGLTVLPPLLTDEMIAQYTSALLAGTITSGWTFGAGPALQIPFAM
QMAYRFNGIGVTQNVLYENQKLlANQFNSAIGKIQDSLSSGPSALGKLQD
VVNQNAQALNTLVKQLSSNFGAISSVLNDILSRLDPVEAEVQIDRLITGR
LQSLQTYVTQQLIRAAEIRASANLAATKMSECVLGQSKRVDFCGKGYHLM
SFPQSAPHGVVFLHVTYVPAQEKNFTTAPAICHDGKAHFPREGVFVSNGT
HWFVTQRNFYEPQIITTDNTFVSGNCDVVIGIVNNTVYDPLQPELDSFKE
ELDKYFKNHTSPDVDLGDISGINASVVNIQKEIDRLNEVAKNLNESLIDL
QELGKYEQ

[0202] SEQ ID NO 74: SEQ ID NO 5 + D614N + A892P + A942P + S943G + K986P

MFVFLVLLPLVSSQCVNLTTRTQLPPAYTNSFTRGVYYPDKVFRSSVLHS
TQDLFLPFFSNVTWFHAIHVSGTNGTKRFDNPVLPFNDGVYFASTEKSNI
IRGWIFGTTLDSKTQSLLlVNNATNVVIKVCEFQFCNDPFLGVYYHKNNK
SWMESEFRVYSSANNCTFEYVSQPFLMDLEGKQGNFKNLREFVFKNIDGY
FKIYSKHTPINLVRDLPQGFSALEPLVDLPIGINITRFQTLLALHRSYLT
PGDSSSGWTAGAAAYYVGYLQPRTFLLKYNENGTITDAVDCALDPLSETK
CTLKSFTVEKGIYQTSNFRVQPTESIVRFPNITNLCPFGEVFNATRFASV
YAWNRKRISNCVADYSVLYNSASFSTFKCYGVSPTKLNDLCFTNVYADSF
VIRGDEVRQIAPGQTGKIADYNYKLPDDFTGCVIAWNSNNLDSKVGGNYN
YLYRLFRKSNLKPFERDISTEIYQAGSTPCNGVEGFNCYFPLQSYGFQPT
NGVGYQPYRVVVLSFELLHAPATVCGPKKSTNLVKNKCVNFNFNGLTGTG
VLTESNKKFLPFQQFGRDIADTTDAVRDPQTLEILDITPCSFGGVSVITP
GTNTSNQVAVLYQNVNCTEVPVAIHADQLTPTWRVYSTGSNVFQTRAGCL
IGAEHVNNSYECDIPIGAGICASYQTQTNSPRRARSVASQSIIAYTMSLG
AENSVAYSNNSIAIPTNFTISVTTEILPVSMTKTSVDCTMYICGDSTECS
NLLLQYGSFCTQLNRALTGIAVEQDKNTQEVFAQVKQIYKTPPIKDFGGF
NFSQILPDPSKPSKRSFIEDLLFNKVTLADAGFlKQYGDCLGDIAARDLI
CAQKFNGLTVLPPLLTDEMIAQYTSALLAGTITSGWTFGAGPALQIPFAM
QMAYRFNGIGVTQNVLYENQKLIANQFNSAIGKIQDSLSSTPGALGKLQD
VVNQNAQALNTLVKQLSSNFGAISSVLNDILSRLDPVEAEVQIDRLlTGR
LQSLQTYVTQQLIRAAEIRASANLAATKMSECVLGQSKRVDFCGKGYHLM
SFPQSAPHGVVFLHVTYVPAQEKNFTTAPAICHDGKAHFPREGVFVSNGT
HWFVTQRNFYEPQIITTDNTFVSGNCDVVIGIVNNTVYDPLOPELDSFKE
ELDKYFKNHTSPDVDLGDISGINASVVNIQKEIDRLNEVAKNLNESLIDL
QELGKYEQ

[0203] SEQ ID NO 75: SEQ ID NO 5 + D614N + A892P + A942P + T941G + S943G + K986P

MFVFLVLLPLVSSQCVNLTTRTQLPPAYTNSFTRGVYYPDKVFRSSVLHS
TQDLFLPFFSNVTWFHAIHVSGTNGTKRFDNPVLPFNDGVYFASTEKSNI
IRGWIFGTTLDSKTQSLLlVNNATNVVIKVCEFQFCNDPFLGVYYHKNNK
SWMESEFRVYSSANNCTFEYVSQPFLMDLEGKQGNFKNLREFVFKNIDGY
FKIYSKHTPINLVRDLPQGFSALEPLVDLPIGINITRFQTLLALHRSYLT
PGDSSSGWTAGAAAYYVGYLQPRTFLLKYNENGTITDAVDCALDPLSETK
CTLKSFTVEKGIYQTSNFRVQPTESIVRFPNITNLCPFGEVFNATRFASV
YAWNRKRISNCVADYSVLYNSASFSTFKCYGVSPTKLNDLCFTNVYADSF
VIRGDEVRQIAPGQTGKIADYNYKLPDDFTGCVIAWNSNNLDSKVGGNYN
YLYRLFRKSNLKPFERDISTEIYQAGSTPCNGVEGFNCYFPLQSYGFQPT
NGVGYQPYRVVVLSFELLHAPATVCGPKKSTNLVKNKCVNFNFNGLTGTG
VLTESNKKFLPFQQFGRDIADTTDAVRDPQTLEILDITPCSFGGVSVITP
GTNTSNQVAVLYQNVNCTEVPVAIHADQLTPTWRVYSTGSNVFQTRAGCL
IGAEHVNNSYECDIPIGAGICASYQTQTNSPRRARSVASQSIIAYTMSLG
AENSVAYSNNSIAIPTNFTISVTTEILPVSMTKTSVDCTMYICGDSTECS
NLLLQYGSFCTQLNRALTGIAVEQDKNTQEVFAQVKQIYKTPPIKDFGGF
NFSQILPDPSKPSKRSFIEDLLFNKVTLADAGFIKQYGDCLGDIAARDLI
CAQKFNGLTVLPPLLTDEMIAQYTSALLAGTITSGWTFGAGPALQIPFAM
QMAYRFNGIGVTQNVLYENQKLIANQFNSAIGKIQDSLSSGPGALGKLQD
VVNQNAQALNTLVKQLSSNFGAISSVLNDILSRLDPVEAEVQIDRLITGR
LQSLQTYVTQQLIRAAEIRASANLAATKMSECVLGQSKRVDFCGKGYHLM
SFPQSAPHGVVFLHVTYVPAQEKNFTTAPAICHDGKAHFPREGVFVSNGT
HWFVTQRNFYEPQIITTDNTFVSGNCDVVIGIVNNTVYDPLQPELDSFKE
ELDKYFKNHTSPDVDLGDISGINASVVNIQKEIDRLNEVAKNLNESLIDL
QELGKYEQ

[0204] SEQ ID NO 76: SEQ ID NO 5 + D614N + A892P + A942P + T941G + A944P + K986P

MFVFLVLLPLVSSQCVNLTTRTQLPPAYTNSFTRGVYYPDKVFRSSVLHS
TQDLFLPFFSNVTWFHAIHVSGTNGTKRFDNPVLPFNDGVYFASTEKSNI
IRGWIFGTTLDSKTQSLLIVNNATNVVIKVCEFQFCNDPFLGVYYHKNNK
SWMESEFRVYSSANNCTFEYVSQPFLMDLEGKQGNFKNLREFVFKNIDGY
FKIYSKHTPINLVRDLPQGFSALEPLVDLPIGINITRFQTLLALHRSYLT
PGDSSSGWTAGAAAYYVGYLQPRTFLLKYNENGTITDAVDCALDPLSETK
CTLKSFTVEKGIYQTSNFRVQPTESIVRFPNITNLCPFGEVFNATRFASV
YAWNRKRISNCVADYSVLYNSASFSTFKCYGVSPTKLNDLCFTNVYADSF
VIRGDEVRQIAPGQTGKIADYNYKLPDDFTGCVIAWNSNNLDSKVGGNYN
YLYRLFRKSNLKPFERDISTEIYQAGSTPCNGVEGFNCYFPLQSYGFQPT
NGVGYQPYRVVVLSFELLHAPATVCGPKKSTNLVKNKCVNFNFNGLTGTG
VLTESNKKFLPFQQFGRDIADTTDAVRDPQTLEILDITPCSFGGVSVITP
GTNTSNQVAVLYQNVNCTEVPVAIHADQLTPTWRVYSTGSNVFQTRAGCL
IGAEHVNNSYECDIPIGAGICASYQTQTNSPRRARSVASQSIIAYTMSLG
AENSVAYSNNSIAIPTNFTISVTTEILPVSMTKTSVDCTMYICGDSTECS
NLLLQYGSFCTQLNRALTGIAVEQDKNTQEVFAQVKQIYKTPPIKDFGGF
NFSQILPDPSKPSKRSFIEDLLFNKVTLADAGFIKQYGDCLGDIAARDLI
CAQKFNGLTVLPPLLTDEMIAQYTSALLAGTITSGWTFGAGPALQIPFAM
QMAYRFNGIGVTQNVLYENQKLIANQFNSAIGKIQDSLSSGPSPLGKLQD
VVNQNAQALNTLVKQLSSNFGAISSVLNDILSRLDPVEAEVQIDRLITGR
LQSLQTYVTQQLIRAAEIRASANLAATKMSECVLGQSKRVDFCGKGYHLM
SFPQSAPHGVVFLHVTYVPAQEKNFTTAPAICHDGKAHFPREGVFVSNGT
HWFVTQRNFYEPQIITTDNTFVSGNCDVVIGIVNNTVYDPLQPELDSFKE
ELDKYFKNHTSPDVDLGDISGINASVVNIQKEIDRLNEVAKNLNESLIDL
QELGKYEQ

[0205] SEQ ID NO 77: SEQ ID NO 5 + D614N + A892P + A942P + S943G + A944P + K986P

MFVFLVLLPLVSSQCVNLTTRTQLPPAYTNSFTRGVYYPDKVFRSSVLHS
TQDLFLPFFSNVTWFHAIHVSGTNGTKRFDNPVLPFNDGVYFASTEKSNI
IRGWIFGTTLDSKTQSLLIVNNATNVVIKVCEFQFCNDPFLGVYYHKNNK
SWMESEFRVYSSANNCTFEYVSQPFLMDLEGKQGNFKNLREFVFKNIDGY
FKIYSKHTPINLVRDLPQGFSALEPLVDLPIGINITRFQTLLALHRSYLT
PGDSSSGWTAGAAAYYVGYLQPRTFLLKYNENGTITDAVDCALDPLSETK
CTLKSFTVEKGIYQTSNFRVQPTESIVRFPNITNLCPFGEVFNATRFASV
YAWNRKRISNCVADYSVLYNSASFSTFKCYGVSPTKLNDLCFTNVYADSF
VIRGDEVRQIAPGQTGKIADYNYKLPDDFTGCVIAWNSNNLDSKVGGNYN
YLYRLFRKSNLKPFERDISTEIYQAGSTPCNGVEGFNCYFPLQSYGFQPT
NGVGYQPYRVVVLSFELLHAPATVCGPKKSTNLVKNKCVNFNFNGLTGTG
VLTESNKKFLPFQQFGRDIADTTDAVRDPQTLEILDITPCSFGGVSVITP
GTNTSNQVAVLYQNVNCTEVPVAIHADQLTPTWRVYSTGSNVFQTRAGCL
lGAEHVNNSYECDIPIGAGICASYQTQTNSPRRARSVASQSIIAYTMSLG
AENSVAYSNNSIAIPTNFTISVTTEILPVSMTKTSVDCTMYICGDSTECS
NLLLQYGSFCTQLNRALTGIAVEQDKNTQEVFAQVKQIYKTPPIKDFGGF
NFSQILPDPSKPSKRSFIEDLLFNKVTLADAGFlKQYGDCLGDIAARDLI
CAQKFNGLTVLPPLLTDEMIAQYTSALLAGTITSGWTFGAGPALQIPFAM
QMAYRFNGIGVTQNVLYENQKLlANQFNSAIGKIQDSLSSTPGPLGKLQD
VVNQNAQALNTLVKQLSSNFGAISSVLNDILSRLDPVEAEVQIDRLITGR
LQSLQTYVTQQLIRAAEIRASANLAATKMSECVLGQSKRVDFCGKGYHLM
SFPQSAPHGVVFLHVTYVPAQEKNFTTAPAICHDGKAHFPREGVFVSNGT
HWFVTQRNFYEPQIITTDNTFVSGNCDVVIGIVNNTVYDPLQPELDSFKE
ELDKYFKNHTSPDVDLGDISGINASVVNIQKEIDRLNEVAKNLNESLIDL
QELGKYEQ

[0206] SEQ ID NO 78: SEQ ID NO 5 + T941G + V987P

MFVFLVLLPLVSSQCVNLTTRTQLPPAYTNSFTRGVYYPDKVFRSSVLHS
TQDLFLPFFSNVTWFHAIHVSGTNGTKRFDNPVLPFNDGVYFASTEKSNI
IRGWIFGTTLDSKTQSLLIVNNATNVVIKVCEFQFCNDPFLGVYYHKNNK
SWMESEFRVYSSANNCTFEYVSQPFLMDLEGKQGNFKNLREFVFKNIDGY
FKIYSKHTPINLVRDLPQGFSALEPLVDLPIGINITRFQTLLALHRSYLT
PGDSSSGWTAGAAAYYVGYLQPRTFLLKYNENGTITDAVDCALDPLSETK
CTLKSFTVEKGIYQTSNFRVQPTESIVRFPNITNLCPFGEVFNATRFASV
YAWNRKRISNCVADYSVLYNSASFSTFKCYGVSPTKLNDLCFTNVYADSF
VIRGDEVRQIAPGQTGKIADYNYKLPDDFTGCVIAWNSNNLDSKVGGNYN
YLYRLFRKSNLKPFERDISTEIYQAGSTPCNGVEGFNCYFPLQSYGFQPT
NGVGYQPYRVVVLSFELLHAPATVCGPKKSTNLVKNKCVNFNFNGLTGTG
VLTESNKKFLPFQQFG RDIADTTDAVRDPQTLEILDITPCSFGGVSVIT
PGTNTSNQVAVLYQDVNCTEVPVAIHADQLTPTWRVYSTGSNVFQTRAGC
LIGAEHVNNSYECDIPIGAGICASYQTQTNSPRRARSVASQSIIAYTMSL
GAENSVAYSNNSIAIPTNFTISVTTEILPVSMTKTSVDCTMYICGDSTEC
SNLLLQYGSFCTQLNRALTGIAVEQDKNTQEVFAQVKQIYKTPPIKDFGG
FNFSQILPDPSKPSKRSFIEDLLFNKVTLADAGFIKQYGDCLGDIAARDL
ICAQKFNGLTVLPPLLTDEMIAQYTSALLAGTITSGWTFGAGAALQIPFA
MQMAYRFNGIGVTQNVLYENQKLIANQFNSAIGKIQDSLSSGASALGKLQ
DVVNQNAQALNTLVKQLSSNFGAISSVLNDILSRLDKPEAEVQIDRLlTG
RLQSLQTYVTQQLIRAAEIRASANLAATKMSECVLGQSKRVDFCGKGYHL
MSFPQSAPHGVVFLHVTYVPAQEKNFTTAPAICHDGKAHFPREGVFVSNG
THWFVTQRNFYEPQIITTDNTFVSGNCDVVIGIVNNTVYDPLQPELDSFK
EELDKYFKNHTSPDVDLGDISGINASVVNIQKEIDRLNEVAKNLNESLID
LQELGKYEQ

[0207] SEQ ID NO 79: SEQ ID NO 5 + S943G + V987P

MFVFLVLLPLVSSQCVNLTTRTQLPPAYTNSFTRGVYYPDKVFRSSVLHS
TQDLFLPFFSNVTWFHAIHVSGTNGTKRFDNPVLPFNDGVYFASTEKSNI
IRGWIFGTTLDSKTQSLLlVNNATNVVIKVCEFQFCNDPFLGVYYHKNNK
SWMESEFRVYSSANNCTFEYVSQPFLMDLEGKQGNFKNLREFVFKNIDGY
FKIYSKHTPINLVRDLPQGFSALEPLVDLPIGINITRFQTLLALHRSYLT
PGDSSSGWTAGAAAYYVGYLQPRTFLLKYNENGTITDAVDCALDPLSETK
CTLKSFTVEKGIYQTSNFRVQPTESIVRFPNITNLCPFGEVFNATRFASV
YAWNRKRISNCVADYSVLYNSASFSTFKCYGVSPTKLNDLCFTNVYADSF
VIRGDEVRQIAPGQTGKIADYNYKLPDDFTGCVIAWNSNNLDSKVGGNYN
YLYRLFRKSNLKPFERDISTEIYQAGSTPCNGVEGFNCYFPLQSYGFQPT
NGVGYQPYRVVVLSFELLHAPATVCGPKKSTNLVKNKCVNFNFNGLTGTG
VLTESNKKFLPFQQFGRDIADTTDAVRDPQTLEILDITPCSFGGVSVITP
GTNTSNQVAVLYQDVNCTEVPVAIHADQLTPTWRVYSTGSNVFQTRAGCL
IGAEHVNNSYECDIPIGAGICASYQTQTNSPRRARSVASQSIIAYTMSLG
AENSVAYSNNSIAIPTNFTISVTTEILPVSMTKTSVDCTMYICGDSTECS
NLLLQYGSFCTQLNRALTGIAVEQDKNTQEVFAQVKQIYKTPPIKDFGGF
NFSQILPDPSKPSKRSFIEDLLFNKVTLADAGFIKQYGDCLGDIAARDLI
CAQKFNGLTVLPPLLTDEMIAQYTSALLAGTITSGWTFGAGAALQIPFAM
QMAYRFNGIGVTQNVLYENQKLIANQFNSAIGKIQDSLSSTAGALGKLQD
VVNQNAQALNTLVKQLSSNFGAISSVLNDILSRLDKPEAEVQIDRLlTGR
LQSLQTYVTQQLIRAAEIRASANLAATKMSECVLGQSKRVDFCGKGYHLM
SFPQSAPHGVVFLHVTYVPAQEKNFTTAPAICHDGKAHFPREGVFVSNGT
HWFVTQRNFYEPQIITTDNTFVSGNCDVVIGIVNNTVYDPLQPELDSFKE
ELDKYFKNHTSPDVDLGDISGINASVVNIQKEIDRLNEVAKNLNESLIDL
QELGKYEQ

[0208] SEQ ID NO 80: SEQ ID NO 5 + D614N + A892P + A942P + T941G + V987P

MFVFLVLLPLVSSQCVNLTTRTQLPPAYTNSFTRGVYYPDKVFRSSVLHS
TQDLFLPFFSNVTWFHAIHVSGTNGTKRFDNPVLPFNDGVYFASTEKSNI
IRGWIFGTTLDSKTQSLLIVNNATNVVIKVCEFQFCNDPFLGVYYHKNNK
SWMESEFRVYSSANNCTFEYVSQPFLMDLEGKQGNFKNLREFVFKNIDGY
FKIYSKHTPINLVRDLPQGFSALEPLVDLPIGINITRFQTLLALHRSYLT
PGDSSSGWTAGAAAYYVGYLQPRTFLLKYNENGTITDAVDCALDPLSETK
CTLKSFTVEKGIYQTSNFRVQPTESIVRFPNITNLCPFGEVFNATRFASV
YAWNRKRISNCVADYSVLYNSASFSTFKCYGVSPTKLNDLCFTNVYADSF
VIRGDEVRQIAPGQTGKIADYNYKLPDDFTGCVIAWNSNNLDSKVGGNYN
YLYRLFRKSNLKPFERDISTEIYQAGSTPCNGVEGFNCYFPLQSYGFQPT
NGVGYQPYRVVVLSFELLHAPATVCGPKKSTNLVKNKCVNFNFNGLTGTG
VLTESNKKFLPFQQFGRDIADTTDAVRDPQTLEILDITPCSFGGVSVITP
GTNTSNQVAVLYQNVNCTEVPVAIHADQLTPTWRVYSTGSNVFQTRAGCL
IGAEHVNNSYECDIPIGAGICASYQTQTNSPRRARSVASQSIIAYTMSLG
AENSVAYSNNSIAIPTNFTISVTTEILPVSMTKTSVDCTMYICGDSTECS
NLLLQYGSFCTQLNRALTGIAVEQDKNTQEVFAQVKQIYKTPPIKDFGGF
NFSQILPDPSKPSKRSFIEDLLFNKVTLADAGFIKQYGDCLGDIAARDLI
CAQKFNGLTVLPPLLTDEMIAQYTSALLAGTITSGWTFGAGPALQIPFAM
QMAYRFNGIGVTQNVLYENQKLIANQFNSAIGKIQDSLSSGPSALGKLQD
VVNQNAQALNTLVKQLSSNFGAISSVLNDILSRLDKPEAEVQIDRLITGR
LQSLQTYVTQQLIRAAEIRASANLAATKMSECVLGQSKRVDFCGKGYHLM
SFPQSAPHGVVFLHVTYVPAQEKNFTTAPAICHDGKAHFPREGVFVSNGT
HWFVTQRNFYEPQIITTDNTFVSGNCDVVIGIVNNTVYDPLQPELDSFKE
ELDKYFKNHTSPDVDLGDISGINASVVNIQKEIDRLNEVAKNLNESLIDL
QELGKYEQ

[0209] SEQ ID NO 81: SEQ ID NO 5 + D614N + A892P + A942P + S943G + V987P

MFVFLVLLPLVSSQCVNLTTRTQLPPAYTNSFTRGVYYPDKVFRSSVLHS
TQDLFLPFFSNVTWFHAIHVSGTNGTKRFDNPVLPFNDGVYFASTEKSNI
IRGWIFGTTLDSKTQSLLIVNNATNVVIKVCEFQFCNDPFLGVYYHKNNK
SWMESEFRVYSSANNCTFEYVSQPFLMDLEGKQGNFKNLREFVFKNIDGY
FKIYSKHTPINLVRDLPQGFSALEPLVDLPIGINITRFQTLLALHRSYLT
PGDSSSGWTAGAAAYYVGYLQPRTFLLKYNENGTITDAVDCALDPLSETK
CTLKSFTVEKGIYQTSNFRVQPTESIVRFPNITNLCPFGEVFNATRFASV
YAWNRKRISNCVADYSVLYNSASFSTFKCYGVSPTKLNDLCFTNVYADSF
VIRGDEVRQIAPGQTGKIADYNYKLPDDFTGCVIAWNSNNLDSKVGGNYN
YLYRLFRKSNLKPFERDISTEIYQAGSTPCNGVEGFNCYFPLQSYGFQPT
NGVGYQPYRVVVLSFELLHAPATVCGPKKSTNLVKNKCVNFNFNGLTGTG
VLTESNKKFLPFQQFGRDIADTTDAVRDPQTLEILDITPCSFGGVSVITP
GTNTSNQVAVLYQNVNCTEVPVAIHADQLTPTWRVYSTGSNVFQTRAGCL
IGAEHVNNSYECDIPIGAGICASYQTQTNSPRRARSVASQSIIAYTMSLG
AENSVAYSNNSIAIPTNFTISVTTEILPVSMTKTSVDCTMYICGDSTECS
NLLLQYGSFCTQLNRALTGIAVEQDKNTQEVFAQVKQIYKTPPIKDFGGF
NFSQILPDPSKPSKRSFIEDLLFNKVTLADAGFIKQYGDCLGDIAARDLI
CAQKFNGLTVLPPLLTDEMIAQYTSALLAGTITSGWTFGAGPALQIPFAM
QMAYRFNGIGVTQNVLYENQKLIANQFNSAlGKIQDSLSSTPGALGKLQD
VVNQNAQALNTLVKQLSSNFGAISSVLNDILSRLDKPEAEVQIDRLlTGR
LQSLQTYVTQQLIRAAEIRASANLAATKMSECVLGQSKRVDFCGKGYHLM
SFPQSAPHGVVFLHVTYVPAQEKNFTTAPAICHDGKAHFPREGVFVSNGT
HWFVTQRNFYEPQIITTDNTFVSGNCDVVIGIVNNTVYDPLQPELDSFKE
ELDKYFKNHTSPDVDLGDISGINASVVNIQKEIDRLNEVAKNLNESLIDL
QELGKYEQ

[0210] SEQ ID NO 82: SEQ ID NO 5 + D614N + A892P + A942P + T941G + S943G + V987P

MFVFLVLLPLVSSQCVNLTTRTQLPPAYTNSFTRGVYYPDKVFRSSVLHS
TQDLFLPFFSNVTWFHAIHVSGTNGTKRFDNPVLPFNDGVYFASTEKSNI
IRGWIFGTTLDSKTQSLLlVNNATNVVIKVCEFQFCNDPFLGVYYHKNNK
SWMESEFRVYSSANNCTFEYVSQPFLMDLEGKQGNFKNLREFVFKNIDGY
FKIYSKHTPINLVRDLPQGFSALEPLVDLPIGINITRFQTLLALHRSYLT
PGDSSSGWTAGAAAYYVGYLQPRTFLLKYNENGTITDAVDCALDPLSETK
CTLKSFTVEKGIYQTSNFRVQPTESIVRFPNITNLCPFGEVFNATRFASV
YAWNRKRISNCVADYSVLYNSASFSTFKCYGVSPTKLNDLCFTNVYADSF
VIRGDEVRQIAPGQTGKIADYNYKLPDDFTGCVIAWNSNNLDSKVGGNYN
YLYRLFRKSNLKPFERDISTEIYQAGSTPCNGVEGFNCYFPLQSYGFQPT
NGVGYQPYRVVVLSFELLHAPATVCGPKKSTNLVKNKCVNFNFNGLTGTG
VLTESNKKFLPFQQFGRDIADTTDAVRDPQTLEILDITPCSFGGVSVITP
GTNTSNQVAVLYQNVNCTEVPVAIHADQLTPTWRVYSTGSNVFQTRAGCL
IGAEHVNNSYECDIPIGAGICASYQTQTNSPRRARSVASQSIIAYTMSLG
AENSVAYSNNSIAIPTNFTISVTTEILPVSMTKTSVDCTMYICGDSTECS
NLLLQYGSFCTQLNRALTGIAVEQDKNTQEVFAQVKQIYKTPPIKDFGGF
NFSQILPDPSKPSKRSFIEDLLFNKVTLADAGFIKQYGDCLGDIAARDLI
CAQKFNGLTVLPPLLTDEMIAQYTSALLAGTITSGWTFGAGPALQIPFAM
QMAYRFNGIGVTQNVLYENQKLlANQFNSAIGKIQDSLSSGPGALGKLQD
VVNQNAQALNTLVKQLSSNFGAISSVLNDILSRLDKPEAEVQIDRLlTGR
LQSLQTYVTQQLIRAAEIRASANLAATKMSECVLGQSKRVDFCGKGYHLM
SFPQSAPHGVVFLHVTYVPAQEKNFTTAPAICHDGKAHFPREGVFVSNGT
HWFVTQRNFYEPQIITTDNTFVSGNCDVVIGIVNNTVYDPLQPELDSFKE
ELDKYFKNHTSPDVDLGDISGINASVVNIQKEIDRLNEVAKNLNESLIDL
QELGKYEQ

[0211] SEQ ID NO 83: SEQ ID NO 5 + D614N + A892P + A942P + T941G + A944P + V987P

MFVFLVLLPLVSSQCVNLTTRTQLPPAYTNSFTRGVYYPDKVFRSSVLHS
TQDLFLPFFSNVTWFHAIHVSGTNGTKRFDNPVLPFNDGVYFASTEKSNI
IRGWIFGTTLDSKTQSLLlVNNATNVVIKVCEFQFCNDPFLGVYYHKNNK
SWMESEFRVYSSANNCTFEYVSQPFLMDLEGKQGNFKNLREFVFKNIDGY
FKIYSKHTPINLVRDLPQGFSALEPLVDLPIGINITRFQTLLALHRSYLT
PGDSSSGWTAGAAAYYVGYLQPRTFLLKYNENGTITDAVDCALDPLSETK
CTLKSFTVEKGIYQTSNFRVQPTESIVRFPNITNLCPFGEVFNATRFASV
YAWNRKRISNCVADYSVLYNSASFSTFKCYGVSPTKLNDLCFTNVYADSF
VIRGDEVRQIAPGQTGKIADYNYKLPDDFTGCVIAWNSNNLDSKVGGNYN
YLYRLFRKSNLKPFERDISTEIYQAGSTPCNGVEGFNCYFPLQSYGFQPT
NGVGYQPYRVVVLSFELLHAPATVCGPKKSTNLVKNKCVNFNFNGLTGTG
VLTESNKKFLPFQQFGRDIADTTDAVRDPQTLEILDITPCSFGGVSVITP
GTNTSNQVAVLYQNVNCTEVPVAIHADQLTPTWRVYSTGSNVFQTRAGCL
IGAEHVNNSYECDIPIGAGICASYQTQTNSPRRARSVASQSIIAYTMSLG
AENSVAYSNNSIAIPTNFTISVTTEILPVSMTKTSVDCTMYICGDSTECS
NLLLQYGSFCTQLNRALTGIAVEQDKNTQEVFAQVKQIYKTPPIKDFGGF
NFSQILPDPSKPSKRSFIEDLLFNKVTLADAGFIKQYGDCLGDIAARDLI
CAQKFNGLTVLPPLLTDEMIAQYTSALLAGTITSGWTFGAGPALQIPFAM
QMAYRFNGIGVTQNVLYENQKLIANQFNSAIGKIQDSLSSGPSPLGKLQD
VVNQNAQALNTLVKQLSSNFGAISSVLNDILSRLDKPEAEVQIDRLITGR
LQSLQTYVTQQLIRAAEIRASANLAATKMSECVLGQSKRVDFCGKGYHLM
SFPQSAPHGVVFLHVTYVPAQEKNFTTAPAICHDGKAHFPREGVFVSNGT
HWFVTQRNFYEPQIITTDNTFVSGNCDVVIGIVNNTVYDPLQPELDSFKE
ELDKYFKNHTSPDVDLGDISGINASVVNIQKEIDRLNEVAKNLNESLIDL
QELGKYEQ

[0212] SEQ ID NO 84: SEQ ID NO 5 + D614N + A892P + A942P + S943G + A944P + V987P

MFVFLVLLPLVSSQCVNLTTRTQLPPAYTNSFTRGVYYPDKVFRSSVLHS
TQDLFLPFFSNVTWFHAIHVSGTNGTKRFDNPVLPFNDGVYFASTEKSNI
IRGWIFGTTLDSKTQSLLlVNNATNVVIKVCEFQFCNDPFLGVYYHKNNK
SWMESEFRVYSSANNCTFEYVSQPFLMDLEGKQGNFKNLREFVFKNIDGY
FKIYSKHTPINLVRDLPQGFSALEPLVDLPIGINITRFQTLLALHRSYLT
PGDSSSGWTAGAAAYYVGYLQPRTFLLKYNENGTITDAVDCALDPLSETK
CTLKSFTVEKGIYQTSNFRVQPTESIVRFPNITNLCPFGEVFNATRFASV
YAWNRKRISNCVADYSVLYNSASFSTFKCYGVSPTKLNDLCFTNVYADSF
VIRGDEVRQIAPGQTGKIADYNYKLPDDFTGCVIAWNSNNLDSKVGGNYN
YLYRLFRKSNLKPFERDISTEIYQAGSTPCNGVEGFNCYFPLQSYGFQPT
NGVGYQPYRVVVLSFELLHAPATVCGPKKSTNLVKNKCVNFNFNGLTGTG
VLTESNKKFLPFQQFGRDIADTTDAVRDPQTLEILDITPCSFGGVSVITP
GTNTSNQVAVLYQNVNCTEVPVAIHADQLTPTWRVYSTGSNVFQTRAGCL
IGAEHVNNSYECDIPIGAGICASYQTQTNSPRRARSVASQSIIAYTMSLG
AENSVAYSNNSIAIPTNFTISVTTEILPVSMTKTSVDCTMYICGDSTECS
NLLLQYGSFCTQLNRALTGIAVEQDKNTQEVFAQVKQIYKTPPIKDFGGF
NFSQILPDPSKPSKRSFIEDLLFNKVTLADAGFIKQYGDCLGDIAARDLI
CAQKFNGLTVLPPLLTDEMIAQYTSALLAGTITSGWTFGAGPALQIPFAM
QMAYRFNGIGVTQNVLYENQKLIANQFNSAIGKIQDSLSSTPGPLGKLQD
VVNQNAQALNTLVKQLSSNFGAISSVLNDILSRLDKPEAEVQIDRLITGR
LQSLQTYVTQQLIRAAEIRASANLAATKMSECVLGQSKRVDFCGKGYHLM
SFPQSAPHGVVFLHVTYVPAQEKNFTTAPAICHDGKAHFPREGVFVSNGT
HWFVTQRNFYEPQIITTDNTFVSGNCDVVIGIVNNTVYDPLQPELDSFKE
ELDKYFKNHTSPDVDLGDISGINASVVNIQKEIDRLNEVAKNLNESLIDL
QELGKYEQ

[0213] SEQ ID NO 85: SEQ ID NO 5 + T941G + K986P + V987P

MFVFLVLLPLVSSQCVNLTTRTQLPPAYTNSFTRGVYYPDKVFRSSVLHS
TQDLFLPFFSNVTWFHAIHVSGTNGTKRFDNPVLPFNDGVYFASTEKSNI
IRGWIFGTTLDSKTQSLLIVNNATNVVIKVCEFQFCNDPFLGVYYHKNNK
SWMESEFRVYSSANNCTFEYVSQPFLMDLEGKQGNFKNLREFVFKNIDGY
FKIYSKHTPINLVRDLPQGFSALEPLVDLPIGINITRFQTLLALHRSYLT
PGDSSSGWTAGAAAYYVGYLQPRTFLLKYNENGTITDAVDCALDPLSETK
CTLKSFTVEKGIYQTSNFRVQPTESIVRFPNITNLCPFGEVFNATRFASV
YAWNRKRISNCVADYSVLYNSASFSTFKCYGVSPTKLNDLCFTNVYADSF
VIRGDEVRQIAPGQTGKIADYNYKLPDDFTGCVIAWNSNNLDSKVGGNYN
YLYRLFRKSNLKPFERDISTEIYQAGSTPCNGVEGFNCYFPLQSYGFQPT
NGVGYQPYRVVVLSFELLHAPATVCGPKKSTNLVKNKCVNFNFNGLTGTG
VLTESNKKFLPFQQFGRDIADTTDAVRDPQTLEILDITPCSFGGVSVITP
GTNTSNQVAVLYQDVNCTEVPVAIHADQLTPTWRVYSTGSNVFQTRAGCL
IGAEHVNNSYECDIPIGAGICASYQTQTNSPRRARSVASQSIIAYTMSLG
AENSVAYSNNSIAIPTNFTISVTTEILPVSMTKTSVDCTMYICGDSTECS
NLLLQYGSFCTQLNRALTGIAVEQDKNTQEVFAQVKQIYKTPPIKDFGGF
NFSQILPDPSKPSKRSFIEDLLFNKVTLADAGFIKQYGDCLGDIAARDLI
CAQKFNGLTVLPPLLTDEMIAQYTSALLAGTITSGWTFGAGAALQIPFAM
QMAYRFNGIGVTQNVLYENQKLIANQFNSAIGKIQDSLSSGASALGKLQD
VVNQNAQALNTLVKQLSSNFGAISSVLNDILSRLDPPEAEVQIDRLITGR
LQSLQTYVTQQLIRAAEIRASANLAATKMSECVLGQSKRVDFCGKGYHLM
SFPQSAPHGVVFLHVTYVPAQEKNFTTAPAICHDGKAHFPREGVFVSNGT
HWFVTQRNFYEPQIITTDNTFVSGNCDVVIGIVNNTVYDPLQPELDSFKE
ELDKYFKNHTSPDVDLGDISGINASVVNIQKEIDRLNEVAKNLNESLIDL
QELGKYEQ

[0214] SEQ ID NO 86: SEQ ID NO 5 + S943G + K986P + V987P

MFVFLVLLPLVSSQCVNLTTRTQLPPAYTNSFTRGVYYPDKVFRSSVLHS
TQDLFLPFFSNVTWFHAIHVSGTNGTKRFDNPVLPFNDGVYFASTEKSNI
IRGWIFGTTLDSKTQSLLlVNNATNVVIKVCEFQFCNDPFLGVYYHKNNK
SWMESEFRVYSSANNCTFEYVSQPFLMDLEGKQGNFKNLREFVFKNIDGY
FKIYSKHTPINLVRDLPQGFSALEPLVDLPIGINITRFQTLLALHRSYLT
PGDSSSGWTAGAAAYYVGYLQPRTFLLKYNENGTITDAVDCALDPLSETK
CTLKSFTVEKGIYQTSNFRVQPTESIVRFPNITNLCPFGEVFNATRFASV
YAWNRKRISNCVADYSVLYNSASFSTFKCYGVSPTKLNDLCFTNVYADSF
VIRGDEVRQIAPGQTGKIADYNYKLPDDFTGCVIAWNSNNLDSKVGGNYN
YLYRLFRKSNLKPFERDISTEIYQAGSTPCNGVEGFNCYFPLQSYGFQPT
NGVGYQPYRVVVLSFELLHAPATVCGPKKSTNLVKNKCVNFNFNGLTGTG
VLTESNKKFLPFQQFGRDIADTTDAVRDPQTLEILDITPCSFGGVSVITP
GTNTSNQVAVLYQDVNCTEVPVAIHADQLTPTWRVYSTGSNVFQTRAGCL
IGAEHVNNSYECDIPIGAGICASYQTQTNSPRRARSVASQSIIAYTMSLG
AENSVAYSNNSIAIPTNFTISVTTEILPVSMTKTSVDCTMYICGDSTECS
NLLLQYGSFCTQLNRALTGIAVEQDKNTQEVFAQVKQIYKTPPIKDFGGF
NFSQILPDPSKPSKRSFIEDLLFNKVTLADAGFIKQYGDCLGDIAARDLI
CAQKFNGLTVLPPLLTDEMIAQYTSALLAGTITSGWTFGAGAALQIPFAM
QMAYRFNGIGVTQNVLYENQKLIANQFNSAIGKIQDSLSSTAGALGKLQD
VVNQNAQALNTLVKQLSSNFGAISSVLNDILSRLDPPEAEVQIDRLITGR
LQSLQTYVTQQLIRAAEIRASANLAATKMSECVLGQSKRVDFCGKGYHLM
SFPQSAPHGVVFLHVTYVPAQEKNFTTAPAICHDGKAHFPREGVFVSNGT
HWFVTQRNFYEPQIITTDNTFVSGNCDVVIGIVNNTVYDPLQPELDSFKE
ELDKYFKNHTSPDVDLGDISGINASVVNIQKEIDRLNEVAKNLNESLIDL
QELGKYEQ

[0215] SEQ ID NO 87: SEQ ID NO 5 + D614N + A892P + A942P + T941G + K986P + V987P

MFVFLVLLPLVSSQCVNLTTRTQLPPAYTNSFTRGVYYPDKVFRSSVLHS
TQDLFLPFFSNVTWFHAIHVSGTNGTKRFDNPVLPFNDGVYFASTEKSNI
IRGWIFGTTLDSKTQSLLlVNNATNVVIKVCEFQFCNDPFLGVYYHKNNK
SWMESEFRVYSSANNCTFEYVSQPFLMDLEGKQGNFKNLREFVFKNIDGY
FKIYSKHTPINLVRDLPQGFSALEPLVDLPIGINITRFQTLLALHRSYLT
PGDSSSGWTAGAAAYYVGYLQPRTFLLKYNENGTITDAVDCALDPLSETK
CTLKSFTVEKGIYQTSNFRVQPTESIVRFPNITNLCPFGEVFNATRFASV
YAWNRKRISNCVADYSVLYNSASFSTFKCYGVSPTKLNDLCFTNVYADSF
VIRGDEVRQIAPGQTGKIADYNYKLPDDFTGCVIAWNSNNLDSKVGGNYN
YLYRLFRKSNLKPFERDISTEIYQAGSTPCNGVEGFNCYFPLQSYGFQPT
NGVGYQPYRVVVLSFELLHAPATVCGPKKSTNLVKNKCVNFNFNGLTGTG
VLTESNKKFLPFQQFGRDIADTTDAVRDPQTLEILDITPCSFGGVSVITP
GTNTSNQVAVLYQNVNCTEVPVAIHADQLTPTWRVYSTGSNVFQTRAGCL
IGAEHVNNSYECDIPIGAGICASYQTQTNSPRRARSVASQSIIAYTMSLG
AENSVAYSNNSIAIPTNFTISVTTEILPVSMTKTSVDCTMYICGDSTECS
NLLLQYGSFCTQLNRALTGIAVEQDKNTQEVFAQVKQIYKTPPIKDFGGF
NFSQILPDPSKPSKRSFIEDLLFNKVTLADAGFIKQYGDCLGDIAARDLI
CAQKFNGLTVLPPLLTDEMIAQYTSALLAGTITSGWTFGAGPALQIPFAM
QMAYRFNGIGVTQNVLYENQKLIANQFNSAIGKIQDSLSSGPSALGKLQD
VVNQNAQALNTLVKQLSSNFGAISSVLNDILSRLDPPEAEVQIDRLlTGR
LQSLQTYVTQQLIRAAEIRASANLAATKMSECVLGQSKRVDFCGKGYHLM
SFPQSAPHGVVFLHVTYVPAQEKNFTTAPAICHDGKAHFPREGVFVSNGT
HWFVTQRNFYEPQIITTDNTFVSGNCDVVIGIVNNTVYDPLQPELDSFKE
ELDKYFKNHTSPDVDLGDISGINASVVNIQKEIDRLNEVAKNLNESLIDL
QELGKYEQ

[0216] SEQ ID NO 88: SEQ ID NO 5 + D614N + A892P + A942P + S943G + K986P + V987P

MFVFLVLLPLVSSQCVNLTTRTQLPPAYTNSFTRGVYYPDKVFRSSVLHS
TQDLFLPFFSNVTWFHAIHVSGTNGTKRFDNPVLPFNDGVYFASTEKSNI
IRGWIFGTTLDSKTQSLLIVNNATNVVIKVCEFQFCNDPFLGVYYHKNNK
SWMESEFRVYSSANNCTFEYVSQPFLMDLEGKQGNFKNLREFVFKNIDGY
FKIYSKHTPINLVRDLPQGFSALEPLVDLPIGINITRFQTLLALHRSYLT
PGDSSSGWTAGAAAYYVGYLQPRTFLLKYNENGTITDAVDCALDPLSETK
CTLKSFTVEKGIYQTSNFRVQPTESIVRFPNITNLCPFGEVFNATRFASV
YAWNRKRISNCVADYSVLYNSASFSTFKCYGVSPTKLNDLCFTNVYADSF
VIRGDEVRQIAPGQTGKIADYNYKLPDDFTGCVIAWNSNNLDSKVGGNYN
YLYRLFRKSNLKPFERDISTEIYQAGSTPCNGVEGFNCYFPLQSYGFQPT
NGVGYQPYRVVVLSFELLHAPATVCGPKKSTNLVKNKCVNFNFNGLTGTG
VLTESNKKFLPFQQFGRDIADTTDAVRDPQTLEILDITPCSFGGVSVITP
GTNTSNQVAVLYQNVNCTEVPVAIHADQLTPTWRVYSTGSNVFQTRAGCL
IGAE HVN NSYECDIPIGAGICASYQTQTNSPRRARSVASQSIIAYTMS
LGAENSVAYSNNSIAIPTNFTISVTTEILPVSMTKTSVDCTMYICGDSTE
CSNLLLQYGSFCTQLNRALTGIAVEQDKNTQEVFAQVKQIYKTPPIKDFG
GFNFSQILPDPSKPSKRSFIEDLLFNKVTLADAGFIKQYGDCLGDIAARD
LICAQKFNGLTVLPPLLTDEMIAQYTSALLAGTITSGWTFGAGPALQIPF
AMQMAYRFNGIGVTQNVLYENQKLIANQFNSAlGKIQDSLSSTPGALGKL
QDVVNQNAQALNTLVKQLSSNFGAISSVLNDILSRLDPPEAEVQIDRLIT
GRLQSLQTYVTQQLIRAAEIRASANLAATKMSECVLGQSKRVDFCGKGYH
LMSFPQSAPHGVVFLHVTYVPAQEKNFTTAPAICHDGKAHFPREGVFVSN
GTHWFVTQRNFYEPQIITTDNTFVSGNCDVVIGIVNNTVYDPLQPELDSF
KEELDKYFKNHTSPDVDLGDISGINASVVNIQKEIDRLNEVAKNLNESLI
DLQELGKYEQ

[0217] SEQ ID NO 89: SEQ ID NO 5 + D614N + A892P + A942P + T941G + S943G + K986P + V987P

MFVFLVLLPLVSSQCVNLTTRTQLPPAYTNSFTRGVYYPDKVFRSSVLHS
TQDLFLPFFSNVTWFHAIHVSGTNGTKRFDNPVLPFNDGVYFASTEKSNI
IRGWIFGTTLDSKTQSLLlVNNATNVVIKVCEFQFCNDPFLGVYYHKNNK
SWMESEFRVYSSANNCTFEYVSQPFLMDLEGKQGNFKNLREFVFKNIDGY
FKIYSKHTPINLVRDLPQGFSALEPLVDLPIGINITRFQTLLALHRSYLT
PGDSSSGWTAGAAAYYVGYLQPRTFLLKYNENGTITDAVDCALDPLSETK
CTLKSFTVEKGIYQTSNFRVQPTESIVRFPNITNLCPFGEVFNATRFASV
YAWNRKRISNCVADYSVLYNSASFSTFKCYGVSPTKLNDLCFTNVYADSF
VIRGDEVRQIAPGQTGKIADYNYKLPDDFTGCVIAWNSNNLDSKVGGNYN
YLYRLFRKSNLKPFERDISTEIYQAGSTPCNGVEGFNCYFPLQSYGFQPT
NGVGYQPYRVVVLSFELLHAPATVCGPKKSTNLVKNKCVNFNFNGLTGTG
VLTESNKKFLPFQQFGRDIADTTDAVRDPQTLEILDITPCSFGGVSVITP
GTNTSNQVAVLYQNVNCTEVPVAIHADQLTPTWRVYSTGSNVFQTRAGCL
IGAEHVNNSYECDIPIGAGICASYQTQTNSPRRARSVASQSIIAYTMSLG
AENSVAYSNNSIAIPTNFTISVTTEILPVSMTKTSVDCTMYICGDSTECS
NLLLQYGSFCTQLNRALTGIAVEQDKNTQEVFAQVKQIYKTPPIKDFGGF
NFSQILPDPSKPSKRSFIEDLLFNKVTLADAGFIKQYGDCLGDIAARDLI
CAQKFNGLTVLPPLLTDEMIAQYTSALLAGTITSGWTFGAGPALQIPFAM
QMAYRFNGIGVTQNVLYENQKLIANQFNSAIGKIQDSLSSGPGALGKLQD
VVNQNAQALNTLVKQLSSNFGAISSVLNDILSRLDPPEAEVQIDRLITGR
LQSLQTYVTQQLIRAAEIRASANLAATKMSECVLGQSKRVDFCGKGYHLM
SFPQSAPHGVVFLHVTYVPAQEKNFTTAPAICHDGKAHFPREGVFVSNGT
HWFVTQRNFYEPQIITTDNTFVSGNCDVVIGIVNNTVYDPLQPELDSFKE
ELDKYFKNHTSPDVDLGDISGINASVVNIQKEIDRLNEVAKNLNESLIDL
QELGKYEQ

[0218] SEQ ID NO 90: SEQ ID NO 5 + D614N + A892P + A942P + T941G + A944P + K986P + V987P

MFVFLVLLPLVSSQCVNLTTRTQLPPAYTNSFTRGVYYPDKVFRSSVLHS
TQDLFLPFFSNVTWFHAIHVSGTNGTKRFDNPVLPFNDGVYFASTEKSNI
IRGWIFGTTLDSKTQSLLIVNNATNVVIKVCEFQFCNDPFLGVYYHKNNK
SWMESEFRVYSSANNCTFEYVSQPFLMDLEGKQGNFKNLREFVFKNIDGY
FKIYSKHTPINLVRDLPQGFSALEPLVDLPIGINITRFQTLLALHRSYLT
PGDSSSGWTAGAAAYYVGYLQPRTFLLKYNENGTITDAVDCALDPLSETK
CTLKSFTVEKGIYQTSNFRVQPTESIVRFPNITNLCPFGEVFNATRFASV
YAWNRKRISNCVADYSVLYNSASFSTFKCYGVSPTKLNDLCFTNVYADSF
VIRGDEVRQIAPGQTGKIADYNYKLPDDFTGCVIAWNSNNLDSKVGGNYN
YLYRLFRKSNLKPFERDISTEIYQAGSTPCNGVEGFNCYFPLQSYGFQPT
NGVGYQPYRVVVLSFELLHAPATVCGPKKSTNLVKNKCVNFNFNGLTGTG
VLTESNKKFLPFQQFGRDIADTTDAVRDPQTLEILDITPCSFGGVSVITP
GTNTSNQVAVLYQNVNCTEVPVAIHADQLTPTWRVYSTGSNVFQTRAGCL
IGAEHVNNSYECDIPIGAGICASYQTQTNSPRRARSVASQSIIAYTMSLG
AENSVAYSNNSIAIPTNFTISVTTEILPVSMTKTSVDCTMYICGDSTECS
NLLLQYGSFCTQLNRALTGIAVEQDKNTQEVFAQVKQIYKTPPIKDFGGF
NFSQILPDPSKPSKRSFIEDLLFNKVTLADAGFlKQYGDCLGDIAARDLI
CAQKFNGLTVLPPLLTDEMIAQYTSALLAGTITSGWTFGAGPALQIPFAM
QMAYRFNGIGVTQNVLYENQKLlANQFNSAIGKIQDSLSSGPSPLGKLQD
VVNQNAQALNTLVKQLSSNFGAISSVLNDILSRLDPPEAEVQIDRLlTGR
LQSLQTYVTQQLIRAAEIRASANLAATKMSECVLGQSKRVDFCGKGYHLM
SFPQSAPHGVVFLHVTYVPAQEKNFTTAPAICHDGKAHFPREGVFVSNGT
HWFVTQRNFYEPQIITTDNTFVSGNCDVVIGIVNNTVYDPLQPELDSFKE
ELDKYFKNHTSPDVDLGDISGINASVVNIQKEIDRLNEVAKNLNESLIDL
QELGKYEQ

[0219] SEQ ID NO 91: SEQ ID NO 5 + D614N + A892P + A942P + S943G + A944P + K986P + V987P

MFVFLVLLPLVSSQCVNLTTRTQLPPAYTNSFTRGVYYPDKVFRSSVLHS
TQDLFLPFFSNVTWFHAIHVSGTNGTKRFDNPVLPFNDGVYFASTEKSNI
IRGWIFGTTLDSKTQSLLlVNNATNVVIKVCEFQFCNDPFLGVYYHKNNK
SWMESEFRVYSSANNCTFEYVSQPFLMDLEGKQGNFKNLREFVFKNIDGY
FKIYSKHTPINLVRDLPQGFSALEPLVDLPIGINITRFQTLLALHRSYLT
PGDSSSGWTAGAAAYYVGYLQPRTFLLKYNENGTITDAVDCALDPLSETK
CTLKSFTVEKGIYQTSNFRVQPTESIVRFPNITNLCPFGEVFNATRFASV
YAWNRKRISNCVADYSVLYNSASFSTFKCYGVSPTKLNDLCFTNVYADSF
VIRGDEVRQIAPGQTGKIADYNYKLPDDFTGCVIAWNSNNLDSKVGGNYN
YLYRLFRKSNLKPFERDISTEIYQAGSTPCNGVEGFNCYFPLQSYGFQPT
NGVGYQPYRVVVLSFELLHAPATVCGPKKSTNLVKNKCVNFNFNGLTGTG
VLTESNKKFLPFQQFGRDIADTTDAVRDPQTLEILDITPCSFGGVSVITP
GTNTSNQVAVLYQNVNCTEVPVAIHADQLTPTWRVYSTGSNVFQTRAGCL
IGAEHVNNSYECDIPIGAGICASYQTQTNSPRRARSVASQSIIAYTMSLG
AENSVAYSNNSIAIPTNFTISVTTEILPVSMTKTSVDCTMYICGDSTECS
NLLLQYGSFCTQLNRALTGIAVEQDKNTQEVFAQVKQIYKTPPIKDFGGF
NFSQILPDPSKPSKRSFIEDLLFNKVTLADAGFIKQYGDCLGDIAARDLI
CAQKFNGLTVLPPLLTDEMIAQYTSALLAGTITSGWTFGAGPALQIPFAM
QMAYRFNGIGVTQNVLYENQKLIANQFNSAIGKIQDSLSSTPGPLGKLQD
VVNQNAQALNTLVKQLSSNFGAISSVLNDILSRLDPPEAEVQIDRLITGR
LQSLQTYVTQQLIRAAEIRASANLAATKMSECVLGQSKRVDFCGKGYHLM
SFPQSAPHGVVFLHVTYVPAQEKNFTTAPAICHDGKAHFPREGVFVSNGT
HWFVTQRNFYEPQIITTDNTFVSGNCDVVIGIVNNTVYDPLQPELDSFKE
ELDKYFKNHTSPDVDLGDISGINASVVNIQKEIDRLNEVAKNLNESLIDL
QELGKYEQ

[0220] SEQ ID NO 92: SEQ ID NO 7 + T941G

MFVFLVLLPLVSSQCVNLTTRTQLPPAYTNSFTRGVYYPDKVFRSSVLHS
TQDLFLPFFSNVTWFHAIHVSGTNGTKRFDNPVLPFNDGVYFASTEKSNI
IRGWIFGTTLDSKTQSLLIVNNATNVVIKVCEFQFCNDPFLGVYYHKNNK
SWMESEFRVYSSANNCTFEYVSQPFLMDLEGKQGNFKNLREFVFKNIDGY
FKIYSKHTPINLVRDLPQGFSALEPLVDLPIGINITRFQTLLALHRSYLT
PGDSSSGWTAGAAAYYVGYLQPRTFLLKYNENGTITDAVDCALDPLSETK
CTLKSFTVEKGIYQTSNFRVQPTESIVRFPNITNLCPFGEVFNATRFASV
YAWNRKRISNCVADYSVLYNSASFSTFKCYGVSPTKLNDLCFTNVYADSF
VIRGDEVRQIAPGQTGKIADYNYKLPDDFTGCVIAWNSNNLDSKVGGNYN
YLYRLFRKSNLKPFERDISTEIYQAGSTPCNGVEGFNCYFPLQSYGFQPT
NGVGYQPYRVVVLSFELLHAPATVCGPKKSTNLVKNKCVNFNFNGLTGTG
VLTESNKKFLPFQQFGRDIADTTDAVRDPQTLEILDITPCSFGGVSVITP
GTNTSNQVAVLYQDVNCTEVPVAIHADQLTPTWRVYSTGSNVFQTRAGCL
IGAEHVNNSYECDIPIGAGICASYQTQTNSPSRAGSVASQSIIAYTMSLG
AENSVAYSNNSIAIPTNFTISVTTEILPVSMTKTSVDCTMYICGDSTECS
NLLLQYGSFCTQLNRALTGIAVEQDKNTQEVFAQVKQIYKTPPIKDFGGF
NFSQILPDPSKPSKRSFIEDLLFNKVTLADAGFIKQYGDCLGDIAARDLI
CAQKFNGLTVLPPLLTDEMIAQYTSALLAGTITSGWTFGAGAALQIPFAM
QMAYRFNGIGVTQNVLYENQKLIANQFNSAIGKIQDSLSSGASALGKLQD
VVNQNAQALNTLVKQLSSNFGAISSVLNDILSRLDKVEAEVQIDRLITGR
LQSLQTYVTQQLIRAAEIRASANLAATKMSECVLGQSKRVDFCGKGYHLM
SFPQSAPHGVVFLHVTYVPAQEKNFTTAPAICHDGKAHFPREGVFVSNGT
HWFVTQRNFYEPQIITTDNTFVSGNCDVVIGIVNNTVYDPLQPELDSFKE
ELDKYFKNHTSPDVDLGDISGINASVVNIQKEIDRLNEVAKNLNESLIDL
QELGKYEQ

[0221] SEQ ID NO 93: SEQ ID NO 7 + S943G

MFVFLVLLPLVSSQCVNLTTRTQLPPAYTNSFTRGVYYPDKVFRSSVLHS
TQDLFLPFFSNVTWFHAIHVSGTNGTKRFDNPVLPFNDGVYFASTEKSNI
IRGWIFGTTLDSKTQSLLIVNNATNVVIKVCEFQFCNDPFLGVYYHKNNK
SWMESEFRVYSSANNCTFEYVSQPFLMDLEGKQGNFKNLREFVFKNIDGY
FKIYSKHTPINLVRDLPQGFSALEPLVDLPIGINITRFQTLLALHRSYLT
PGDSSSGWTAGAAAYYVGYLQPRTFLLKYNENGTITDAVDCALDPLSETK
CTLKSFTVEKGIYQTSNFRVQPTESIVRFPNITNLCPFGEVFNATRFASV
YAWNRKRISNCVADYSVLYNSASFSTFKCYGVSPTKLNDLCFTNVYADSF
VIRGDEVRQIAPGQTGKIADYNYKLPDDFTGCVIAWNSNNLDSKVGGNYN
YLYRLFRKSNLKPFERDISTEIYQAGSTPCNGVEGFNCYFPLQSYGFQPT
NGVGYQPYRVVVLSFELLHAPATVCGPKKSTNLVKNKCVNFNFNGLTGTG
VLTESNKKFLPFQQFGRDIADTTDAVRDPQTLEILDITPCSFGGVSVITP
GTNTSNQVAVLYQDVNCTEVPVAIHADQLTPTWRVYSTGSNVFQTRAGCL
IGAEHVNNSYECDIPIGAGICASYQTQTNSPSRAGSVASQSIIAYTMSLG
AENSVAYSNNSIAIPTNFTISVTTEILPVSMTKTSVDCTMYICGDSTECS
NLLLQYGSFCTQLNRALTGIAVEQDKNTQEVFAQVKQIYKTPPIKDFGGF
NFSQILPDPSKPSKRSFIEDLLFNKVTLADAGFIKQYGDCLGDIAARDLI
CAQKFNGLTVLPPLLTDEMIAQYTSALLAGTITSGWTFGAGAALQIPFAM
QMAYRFNGIGVTQNVLYENQKLlANQFNSAIGKIQDSLSSTAGALGKLQD
VVNQNAQALNTLVKQLSSNFGAISSVLNDILSRLDKVEAEVQIDRLITGR
LQSLQTYVTQQLIRAAEIRASANLAATKMSECVLGQSKRVDFCGKGYHLM
SFPQSAPHGVVFLHVTYVPAQEKNFTTAPAICHDGKAHFPREGVFVSNGT
HWFVTQRNFYEPQIITTDNTFVSGNCDVVIGIVNNTVYDPLQPELDSFKE
ELDKYFKNHTSPDVDLGDISGINASVVNIQKEIDRLNEVAKNLNESLIDL
QELGKYEQ

[0222] SEQ ID NO 94: SEQ ID NO 7 + D614N + A892P + A942P + T941G

MFVFLVLLPLVSSQCVNLTTRTQLPPAYTNSFTRGVYYPDKVFRSSVLHS
TQDLFLPFFSNVTWFHAIHVSGTNGTKRFDNPVLPFNDGVYFASTEKSNI
IRGWIFGTTLDSKTQSLLlVNNATNVVIKVCEFQFCNDPFLGVYYHKNNK
SWMESEFRVYSSANNCTFEYVSQPFLMDLEGKQGNFKNLREFVFKNIDGY
FKIYSKHTPINLVRDLPQGFSALEPLVDLPIGINITRFQTLLALHRSYLT
PGDSSSGWTAGAAAYYVGYLQPRTFLLKYNENGTITDAVDCALDPLSETK
CTLKSFTVEKGIYQTSNFRVQPTESIVRFPNITNLCPFGEVFNATRFASV
YAWNRKRISNCVADYSVLYNSASFSTFKCYGVSPTKLNDLCFTNVYADSF
VIRGDEVRQIAPGQTGKIADYNYKLPDDFTGCVIAWNSNNLDSKVGGNYN
YLYRLFRKSNLKPFERDISTEIYQAGSTPCNGVEGFNCYFPLQSYGFQPT
NGVGYQPYRVVVLSFELLHAPATVCGPKKSTNLVKNKCVNFNFNGLTGTG
VLTESNKKFLPFQQFGRDIADTTDAVRDPQTLEILDITPCSFGGVSVITP
GTNTSNQVAVLYQNVNCTEVPVAIHADQLTPTWRVYSTGSNVFQTRAGCL
IGAEHVNNSYECDIPIGAGICASYQTQTNSPSRAGSVASQSIIAYTMSLG
AENSVAYSNNSIAIPTNFTISVTTEILPVSMTKTSVDCTMYICGDSTECS
NLLLQYGSFCTQLNRALTGIAVEQDKNTQEVFAQVKQIYKTPPIKDFGGF
NFSQILPDPSKPSKRSFIEDLLFNKVTLADAGFIKQYGDCLGDIAARDLI
CAQKFNGLTVLPPLLTDEMIAQYTSALLAGTITSGWTFGAGPALQIPFAM
QMAYRFNGIGVTQNVLYENQKLIANQFNSAIGKIQDSLSSGPSALGKLQD
VVNQNAQALNTLVKQLSSNFGAISSVLNDILSRLDKVEAEVQIDRLITGR
LQSLQTYVTQQLIRAAEIRASANLAATKMSECVLGQSKRVDFCGKGYHLM
SFPQSAPHGVVFLHVTYVPAQEKNFTTAPAICHDGKAHFPREGVFVSNGT
HWFVTQRNFYEPQIITTDNTFVSGNCDVVIGIVNNTVYDPLQPELDSFKE
ELDKYFKNHTSPDVDLGDISGINASVVNIQKEIDRLNEVAKNLNESLIDL
QELGKYEQ

[0223] SEQ ID NO 95: SEQ ID NO 7 + D614N + A892P + A942P + S943G

MFVFLVLLPLVSSQCVNLTTRTQLPPAYTNSFTRGVYYPDKVFRSSVLHS
TQDLFLPFFSNVTWFHAIHVSGTNGTKRFDNPVLPFNDGVYFASTEKSNI
IRGWIFGTTLDSKTQSLLlVNNATNVVIKVCEFQFCNDPFLGVYYHKNNK
SWMESEFRVYSSANNCTFEYVSQPFLMDLEGKQGNFKNLREFVFKNIDGY
FKIYSKHTPINLVRDLPQGFSALEPLVDLPIGINITRFQTLLALHRSYLT
PGDSSSGWTAGAAAYYVGYLQPRTFLLKYNENGTITDAVDCALDPLSETK
CTLKSFTVEKGIYQTSNFRVQPTESIVRFPNITNLCPFGEVFNATRFASV
YAWNRKRISNCVADYSVLYNSASFSTFKCYGVSPTKLNDLCFTNVYADSF
VIRGDEVRQIAPGQTGKIADYNYKLPDDFTGCVIAWNSNNLDSKVGGNYN
YLYRLFRKSNLKPFERDISTEIYQAGSTPCNGVEGFNCYFPLQSYGFQPT
NGVGYQPYRVVVLSFELLHAPATVCGPKKSTNLVKNKCVNFNFNGLTGTG
VLTESNKKFLPFQQFGRDIADTTDAVRDPQTLEILDITPCSFGGVSVITP
GTNTSNQVAVLYQNVNCTEVPVAIHADQLTPTWRVYSTGSNVFQTRAGCL
IGAEHVNNSYECDIPIGAGICASYQTQTNSPSRAGSVASQSIIAYTMSLG
AENSVAYSNNSIAIPTNFTISVTTEILPVSMTKTSVDCTMYICGDSTECS
NLLLQYGSFCTQLNRALTGIAVEQDKNTQEVFAQVKQIYKTPPIKDFGGF
NFSQILPDPSKPSKRSFIEDLLFNKVTLADAGFlKQYGDCLGDIAARDLI
CAQKFNGLTVLPPLLTDEMIAQYTSALLAGTITSGWTFGAGPALQIPFAM
QMAYRFNGIGVTQNVLYENQKLIANQFNSAIGKIQDSLSSTPGALGKLQD
VVNQNAQALNTLVKQLSSNFGAISSVLNDILSRLDKVEAEVQIDRLlTGR
LQSLQTYVTQQLIRAAEIRASANLAATKMSECVLGQSKRVDFCGKGYHLM
SFPQSAPHGVVFLHVTYVPAQEKNFTTAPAICHDGKAHFPREGVFVSNGT
HWFVTQRNFYEPQIITTDNTFVSGNCDVVIGIVNNTVYDPLOPELDSFKE
ELDKYFKNHTSPDVDLGDISGINASVVNIQKEIDRLNEVAKNLNESLIDL
QELGKYEQ

[0224] SEQ ID NO 96: SEQ ID NO 7 + D614N + A892P + A942P + T941G + S943G

MFVFLVLLPLVSSQCVNLTTRTQLPPAYTNSFTRGVYYPDKVFRSSVLHS
TQDLFLPFFSNVTWFHAIHVSGTNGTKRFDNPVLPFNDGVYFASTEKSNI
IRGWIFGTTLDSKTQSLLIVNNATNVVIKVCEFQFCNDPFLGVYYHKNNK
SWMESEFRVYSSANNCTFEYVSQPFLMDLEGKQGNFKNLREFVFKNIDGY
FKIYSKHTPINLVRDLPQGFSALEPLVDLPIGINITRFQTLLALHRSYLT
PGDSSSGWTAGAAAYYVGYLQPRTFLLKYNENGTITDAVDCALDPLSETK
CTLKSFTVEKGIYQTSNFRVQPTESIVRFPNITNLCPFGEVFNATRFASV
YAWNRKRISNCVADYSVLYNSASFSTFKCYGVSPTKLNDLCFTNVYADSF
VIRGDEVRQIAPGQTGKIADYNYKLPDDFTGCVIAWNSNNLDSKVGGNYN
YLYRLFRKSNLKPFERDISTEIYQAGSTPCNGVEGFNCYFPLQSYGFQPT
NGVGYQPYRVVVLSFELLHAPATVCGPKKSTNLVKNKCVNFNFNGLTGTG
VLTESNKKFLPFQQFGRDIADTTDAVRDPQTLEILDITPCSFGGVSVITP
GTNTSNQVAVLYQNVNCTEVPVAIHADQLTPTWRVYSTGSNVFQTRAGCL
IGAEHVNNSYECDIPIGAGICASYQTQTNSPSRAGSVASQSIIAYTMSLG
AENSVAYSNNSIAIPTNFTISVTTEILPVSMTKTSVDCTMYICGDSTECS
NLLLQYGSFCTQLNRALTGIAVEQDKNTQEVFAQVKQIYKTPPIKDFGGF
NFSQILPDPSKPSKRSFIEDLLFNKVTLADAGFIKQYGDCLGDIAARDLI
CAQKFNGLTVLPPLLTDEMIAQYTSALLAGTITSGWTFGAGPALQIPFAM
QMAYRFNGIGVTQNVLYENQKLIANQFNSAIGKIQDSLSSGPGALGKLQD
VVNQNAQALNTLVKQLSSNFGAISSVLNDILSRLDKVEAEVQIDRLITGR
LQSLQTYVTQQLIRAAEIRASANLAATKMSECVLGQSKRVDFCGKGYHLM
SFPQSAPHGVVFLHVTYVPAQEKNFTTAPAICHDGKAHFPREGVFVSNGT
HWFVTQRNFYEPQIITTDNTFVSGNCDVVIGIVNNTVYDPLQPELDSFKE
ELDKYFKNHTSPDVDLGDISGINASVVNIQKEIDRLNEVAKNLNESLIDL
QELGKYEQ

[0225] SEQ ID NO 97: SEQ ID NO 7 + D614N + A892P + A942P + T941G + A944P

MFVFLVLLPLVSSQCVNLTTRTQLPPAYTNSFTRGVYYPDKVFRSSVLHS
TQDLFLPFFSNVTWFHAIHVSGTNGTKRFDNPVLPFNDGVYFASTEKSNI
IRGWIFGTTLDSKTQSLLlVNNATNVVIKVCEFQFCNDPFLGVYYHKNNK
SWMESEFRVYSSANNCTFEYVSQPFLMDLEGKQGNFKNLREFVFKNIDGY
FKIYSKHTPINLVRDLPQGFSALEPLVDLPIGINITRFQTLLALHRSYLT
PGDSSSGWTAGAAAYYVGYLQPRTFLLKYNENGTITDAVDCALDPLSETK
CTLKSFTVEKGIYQTSNFRVQPTESIVRFPNITNLCPFGEVFNATRFASV
YAWNRKRISNCVADYSVLYNSASFSTFKCYGVSPTKLNDLCFTNVYADSF
VIRGDEVRQIAPGQTGKIADYNYKLPDDFTGCVIAWNSNNLDSKVGGNYN
YLYRLFRKSNLKPFERDISTEIYQAGSTPCNGVEGFNCYFPLQSYGFQPT
NGVGYQPYRVVVLSFELLHAPATVCGPKKSTNLVKNKCVNFNFNGLTGTG
VLTESNKKFLPFQQFGRDIADTTDAVRDPQTLEILDITPCSFGGVSVITP
GTNTSNQVAVLYQNVNCTEVPVAIHADQLTPTWRVYSTGSNVFQTRAGCL
IGAEHVNNSYECDIPIGAGICASYQTQTNSPSRAGSVASQSIIAYTMSLG
AENSVAYSNNSIAIPTNFTISVTTEILPVSMTKTSVDCTMYICGDSTECS
NLLLQYGSFCTQLNRALTGIAVEQDKNTQEVFAQVKQIYKTPPIKDFGGF
NFSQILPDPSKPSKRSFIEDLLFNKVTLADAGFIKQYGDCLGDIAARDLI
CAQKFNGLTVLPPLLTDEMIAQYTSALLAGTITSGWTFGAGPALQIPFAM
QMAYRFNGIGVTQNVLYENQKLIANQFNSAIGKIQDSLSSGPSPLGKLQD
VVNQNAQALNTLVKQLSSNFGAISSVLNDILSRLDKVEAEVQIDRLITGR
LQSLQTYVTQQLIRAAEIRASANLAATKMSECVLGQSKRVDFCGKGYHLM
SFPQSAPHGVVFLHVTYVPAQEKNFTTAPAICHDGKAHFPREGVFVSNGT
HWFVTQRNFYEPQIITTDNTFVSGNCDVVIGIVNNTVYDPLQPELDSFKE
ELDKYFKNHTSPDVDLGDISGINASVVNIQKEIDRLNEVAKNLNESLIDL
QELGKYEQ

[0226] SEQ ID NO 98: SEQ ID NO 7 + D614N + A892P + A942P + S943G + A944P

MFVFLVLLPLVSSQCVNLTTRTQLPPAYTNSFTRGVYYPDKVFRSSVLHS
TQDLFLPFFSNVTWFHAIHVSGTNGTKRFDNPVLPFNDGVYFASTEKSNI
IRGWIFGTTLDSKTQSLLlVNNATNVVIKVCEFQFCNDPFLGVYYHKNNK
SWMESEFRVYSSANNCTFEYVSQPFLMDLEGKQGNFKNLREFVFKNIDGY
FKIYSKHTPINLVRDLPQGFSALEPLVDLPIGINITRFQTLLALHRSYLT
PGDSSSGWTAGAAAYYVGYLQPRTFLLKYNENGTITDAVDCALDPLSETK
CTLKSFTVEKGIYQTSNFRVQPTESIVRFPNITNLCPFGEVFNATRFASV
YAWNRKRISNCVADYSVLYNSASFSTFKCYGVSPTKLNDLCFTNVYADSF
VIRGDEVRQIAPGQTGKIADYNYKLPDDFTGCVIAWNSNNLDSKVGGNYN
YLYRLFRKSNLKPFERDISTEIYQAGSTPCNGVEGFNCYFPLQSYGFQPT
NGVGYQPYRVVVLSFELLHAPATVCGPKKSTNLVKNKCVNFNFNGLTGTG
VLTESNKKFLPFQQFGRDIADTTDAVRDPQTLEILDITPCSFGGVSVITP
GTNTSNQVAVLYQNVNCTEVPVAIHADQLTPTWRVYSTGSNVFQTRAGCL
IGAEHVNNSYECDIPIGAGICASYQTQTNSPSRAGSVASQSIIAYTMSLG
AENSVAYSNNSIAIPTNFTISVTTEILPVSMTKTSVDCTMYICGDSTECS
NLLLQYGSFCTQLNRALTGIAVEQDKNTQEVFAQVKQIYKTPPIKDFGGF
NFSQILPDPSKPSKRSFIEDLLFNKVTLADAGFlKQYGDCLGDIAARDLI
CAQKFNGLTVLPPLLTDEMIAQYTSALLAGTITSGWTFGAGPALQIPFAM
QMAYRFNGIGVTQNVLYENQKLIANQFNSAIGKIQDSLSSTPGPLGKLQD
VVNQNAQALNTLVKQLSSNFGAISSVLNDILSRLDKVEAEVQIDRLlTGR
LQSLQTYVTQQLIRAAEIRASANLAATKMSECVLGQSKRVDFCGKGYHLM
SFPQSAPHGVVFLHVTYVPAQEKNFTTAPAICHDGKAHFPREGVFVSNGT
HWFVTQRNFYEPQIITTDNTFVSGNCDVVIGIVNNTVYDPLQPELDSFKE
ELDKYFKNHTSPDVDLGDISGINASVVNIQKEIDRLNEVAKNLNESLIDL
QELGKYEQ

[0227] SEQ ID NO 99: SEQ ID NO 7 + T941G + K986P

MFVFLVLLPLVSSQCVNLTTRTQLPPAYTNSFTRGVYYPDKVFRSSVLHS
TQDLFLPFFSNVTWFHAIHVSGTNGTKRFDNPVLPFNDGVYFASTEKSNI
IRGWIFGTTLDSKTQSLLlVNNATNVVIKVCEFQFCNDPFLGVYYHKNNK
SWMESEFRVYSSANNCTFEYVSQPFLMDLEGKQGNFKNLREFVFKNIDGY
FKIYSKHTPINLVRDLPQGFSALEPLVDLPIGINITRFQTLLALHRSYLT
PGDSSSGWTAGAAAYYVGYLQPRTFLLKYNENGTITDAVDCALDPLSETK
CTLKSFTVEKGIYQTSNFRVQPTESIVRFPNITNLCPFGEVFNATRFASV
YAWNRKRISNCVADYSVLYNSASFSTFKCYGVSPTKLNDLCFTNVYADSF
VIRGDEVRQIAPGQTGKIADYNYKLPDDFTGCVIAWNSNNLDSKVGGNYN
YLYRLFRKSNLKPFERDISTEIYQAGSTPCNGVEGFNCYFPLQSYGFQPT
NGVGYQPYRVVVLSFELLHAPATVCGPKKSTNLVKNKCVNFNFNGLTGTG
VLTESNKKFLPFQQFGRDIADTTDAVRDPQTLEILDITPCSFGGVSVITP
GTNTSNQVAVLYQDVNCTEVPVAIHADQLTPTWRVYSTGSNVFQTRAGCL
IGAEHVNNSYECDIPIGAGICASYQTQTNSPSRAGSVASQSIIAYTMSLG
AENSVAYSNNSIAIPTNFTISVTTEILPVSMTKTSVDCTMYICGDSTECS
NLLLQYGSFCTQLNRALTGIAVEQDKNTQEVFAQVKQIYKTPPIKDFGGF
NFSQILPDPSKPSKRSFIEDLLFNKVTLADAGFIKQYGDCLGDIAARDLI
CAQKFNGLTVLPPLLTDEMIAQYTSALLAGTITSGWTFGAGAALQIPFAM
QMAYRFNGIGVTQNVLYENQKLIANQFNSAIGKIQDSLSSGASALGKLQD
VVNQNAQALNTLVKQLSSNFGAISSVLNDILSRLDPVEAEVQIDRLITGR
LQSLQTYVTQQLIRAAEIRASANLAATKMSECVLGQSKRVDFCGKGYHLM
SFPQSAPHGVVFLHVTYVPAQEKNFTTAPAICHDGKAHFPREGVFVSNGT
HWFVTQRNFYEPQIITTDNTFVSGNCDVVIGIVNNTVYDPLQPELDSFKE
ELDKYFKNHTSPDVDLGDISGINASVVNIQKEIDRLNEVAKNLNESLIDL
QELGKYEQ

[0228] SEQ ID NO 100: SEQ ID NO 7 + S943G + K986P

MFVFLVLLPLVSSQCVNLTTRTQLPPAYTNSFTRGVYYPDKVFRSSVLHS
TQDLFLPFFSNVTWFHAIHVSGTNGTKRFDNPVLPFNDGVYFASTEKSNI
IRGWIFGTTLDSKTQSLLIVNNATNVVIKVCEFQFCNDPFLGVYYHKNNK
SWMESEFRVYSSANNCTFEYVSQPFLMDLEGKQGNFKNLREFVFKNIDGY
FKIYSKHTPINLVRDLPQGFSALEPLVDLPIGINITRFQTLLALHRSYLT
PGDSSSGWTAGAAAYYVGYLQPRTFLLKYNENGTITDAVDCALDPLSETK
CTLKSFTVEKGIYQTSNFRVQPTESIVRFPNITNLCPFGEVFNATRFASV
YAWNRKRISNCVADYSVLYNSASFSTFKCYGVSPTKLNDLCFTNVYADSF
VIRGDEVRQIAPGQTGKIADYNYKLPDDFTGCVIAWNSNNLDSKVGGNYN
YLYRLFRKSNLKPFERDISTEIYQAGSTPCNGVEGFNCYFPLQSYGFQPT
NGVGYQPYRVVVLSFELLHAPATVCGPKKSTNLVKNKCVNFNFNGLTGTG
VLTESNKKFLPFQQFGRDIADTTDAVRDPQTLEILDITPCSFGGVSVITP
GTNTSNQVAVLYQDVNCTEVPVAIHADQLTPTWRVYSTGSNVFQTRAGCL
lGAEHVNNSYECDIPIGAGICASYQTQTNSPSRAGSVASQSIIAYTMSLG
AENSVAYSNNSIAIPTNFTISVTTEILPVSMTKTSVDCTMYICGDSTECS
NLLLQYGSFCTQLNRALTGIAVEQDKNTQEVFAQVKQIYKTPPIKDFGGF
NFSQILPDPSKPSKRSFIEDLLFNKVTLADAGFIKQYGDCLGDIAARDLI
CAQKFNGLTVLPPLLTDEMIAQYTSALLAGTITSGWTFGAGAALQIPFAM
QMAYRFNGIGVTQNVLYENQKLIANQFNSAIGKIQDSLSSTAGALGKLQD
VVNQNAQALNTLVKQLSSNFGAISSVLNDILSRLDPVEAEVQIDRLITGR
LQSLQTYVTQQLIRAAEIRASANLAATKMSECVLGQSKRVDFCGKGYHLM
SFPQSAPHGVVFLHVTYVPAQEKNFTTAPAICHDGKAHFPREGVFVSNGT
HWFVTQRNFYEPQIITTDNTFVSGNCDVVIGIVNNTVYDPLQPELDSFKE
ELDKYFKNHTSPDVDLGDISGINASVVNIQKEIDRLNEVAKNLNESLIDL
QELGKYEQ

[0229] SEQ ID NO 101: SEQ ID NO 7 + D614N + A892P + A942P + T941G + K986P

MFVFLVLLPLVSSQCVNLTTRTQLPPAYTNSFTRGVYYPDKVFRSSVLHS
TQDLFLPFFSNVTWFHAIHVSGTNGTKRFDNPVLPFNDGVYFASTEKSNI
IRGWIFGTTLDSKTQSLLIVNNATNVVIKVCEFQFCNDPFLGVYYHKNNK
SWMESEFRVYSSANNCTFEYVSQPFLMDLEGKQGNFKNLREFVFKNIDGY
FKIYSKHTPINLVRDLPQGFSALEPLVDLPIGINITRFQTLLALHRSYLT
PGDSSSGWTAGAAAYYVGYLQPRTFLLKYNENGTITDAVDCALDPLSETK
CTLKSFTVEKGIYQTSNFRVQPTESIVRFPNITNLCPFGEVFNATRFASV
YAWNRKRISNCVADYSVLYNSASFSTFKCYGVSPTKLNDLCFTNVYADSF
VIRGDEVRQIAPGQTGKIADYNYKLPDDFTGCVIAWNSNNLDSKVGGNYN
YLYRLFRKSNLKPFERDISTEIYQAGSTPCNGVEGFNCYFPLQSYGFQPT
NGVGYQPYRVVVLSFELLHAPATVCGPKKSTNLVKNKCVNFNFNGLTGTG
VLTESNKKFLPFQQFGRDIADTTDAVRDPQTLEILDITPCSFGGVSVITP
GTNTSNQVAVLYQNVNCTEVPVAIHADQLTPTWRVYSTGSNVFQTRAGCL
IGAEHVNNSYECDIPIGAGICASYQTQTNSPSRAGSVASQSIIAYTMSLG
AENSVAYSNNSIAIPTNFTISVTTEILPVSMTKTSVDCTMYICGDSTECS
NLLLQYGSFCTQLNRALTGIAVEQDKNTQEVFAQVKQIYKTPPIKDFGGF
NFSQILPDPSKPSKRSFIEDLLFNKVTLADAGFIKQYGDCLGDIAARDLI
CAQKFNGLTVLPPLLTDEMIAQYTSALLAGTITSGWTFGAGPALQIPFAM
QMAYRFNGIGVTQNVLYENQKLIANQFNSAIGKIQDSLSSGPSALGKLQD
VVNQNAQALNTLVKQLSSNFGAISSVLNDILSRLDPVEAEVQIDRLITGR
LQSLQTYVTQQLIRAAEIRASANLAATKMSECVLGQSKRVDFCGKGYHLM
SFPQSAPHGVVFLHVTYVPAQEKNFTTAPAICHDGKAHFPREGVFVSNGT
HWFVTQRNFYEPQIITTDNTFVSGNCDVVIGIVNNTVYDPLQPELDSFKE
ELDKYFKNHTSPDVDLGDISGINASVVNIQKEIDRLNEVAKNLNESLIDL
QELGKYEQ

[0230] SEQ ID NO 102: SEQ ID NO 7 + D614N + A892P + A942P + S943G + K986P

MFVFLVLLPLVSSQCVNLTTRTQLPPAYTNSFTRGVYYPDKVFRSSVLHS
TQDLFLPFFSNVTWFHAIHVSGTNGTKRFDNPVLPFNDGVYFASTEKSNI
IRGWIFGTTLDSKTQSLLIVNNATNVVIKVCEFQFCNDPFLGVYYHKNNK
SWMESEFRVYSSANNCTFEYVSQPFLMDLEGKQGNFKNLREFVFKNIDGY
FKIYSKHTPINLVRDLPQGFSALEPLVDLPIGINITRFQTLLALHRSYLT
PGDSSSGWTAGAAAYYVGYLQPRTFLLKYNENGTITDAVDCALDPLSETK
CTLKSFTVEKGIYQTSNFRVQPTESIVRFPNITNLCPFGEVFNATRFASV
YAWNRKRISNCVADYSVLYNSASFSTFKCYGVSPTKLNDLCFTNVYADSF
VIRGDEVRQIAPGQTGKIADYNYKLPDDFTGCVIAWNSNNLDSKVGGNYN
YLYRLFRKSNLKPFERDISTEIYQAGSTPCNGVEGFNCYFPLQSYGFQPT
NGVGYQPYRVVVLSFELLHAPATVCGPKKSTNLVKNKCVNFNFNGLTGTG
VLTESNKKFLPFQQFGRDIADTTDAVRDPQTLEILDITPCSFGGVSVITP
GTNTSNQVAVLYQNVNCTEVPVAIHADQLTPTWRVYSTGSNVFQTRAGCL
IGAEHVNNSYECDIPIGAGICASYQTQTNSPSRAGSVASQSIIAYTMSLG
AENSVAYSNNSIAIPTNFTISVTTEILPVSMTKTSVDCTMYICGDSTECS
NLLLQYGSFCTQLNRALTGIAVEQDKNTQEVFAQVKQIYKTPPIKDFGGF
NFSQILPDPSKPSKRSFIEDLLFNKVTLADAGFIKQYGDCLGDIAARDLI
CAQKFNGLTVLPPLLTDEMIAQYTSALLAGTITSGWTFGAGPALQIPFAM
QMAYRFNGIGVTQNVLYENQKLIANQFNSAlGKIQDSLSSTPGALGKLQD
VVNQNAQALNTLVKQLSSNFGAISSVLNDILSRLDPVEAEVQIDRLITGR
LQSLQTYVTQQLIRAAEIRASANLAATKMSECVLGQSKRVDFCGKGYHLM
SFPQSAPHGVVFLHVTYVPAQEKNFTTAPAICHDGKAHFPREGVFVSNGT
HWFVTQRNFYEPQIITTDNTFVSGNCDVVIGIVNNTVYDPLQPELDSFKE
ELDKYFKNHTSPDVDLGDISGINASVVNIQKEIDRLNEVAKNLNESLIDL
QELGKYEQ

[0231] SEQ ID NO 103: SEQ ID NO 7 + D614N + A892P + A942P + T941G + S943G + K986P

MFVFLVLLPLVSSQCVNLTTRTQLPPAYTNSFTRGVYYPDKVFRSSVLHS
TQDLFLPFFSNVTWFHAIHVSGTNGTKRFDNPVLPFNDGVYFASTEKSNI
IRGWIFGTTLDSKTQSLLlVNNATNVVIKVCEFQFCNDPFLGVYYHKNNK
SWMESEFRVYSSANNCTFEYVSQPFLMDLEGKQGNFKNLREFVFKNIDGY
FKIYSKHTPINLVRDLPQGFSALEPLVDLPIGINITRFQTLLALHRSYLT
PGDSSSGWTAGAAAYYVGYLQPRTFLLKYNENGTITDAVDCALDPLSETK
CTLKSFTVEKGIYQTSNFRVQPTESIVRFPNITNLCPFGEVFNATRFASV
YAWNRKRISNCVADYSVLYNSASFSTFKCYGVSPTKLNDLCFTNVYADSF
VIRGDEVRQIAPGQTGKIADYNYKLPDDFTGCVIAWNSNNLDSKVGGNYN
YLYRLFRKSNLKPFERDISTEIYQAGSTPCNGVEGFNCYFPLQSYGFQPT
NGVGYQPYRVVVLSFELLHAPATVCGPKKSTNLVKNKCVNFNFNGLTGTG
VLTESNKKFLPFQQFGRDIADTTDAVRDPQTLEILDITPCSFGGVSVITP
GTNTSNQVAVLYQNVNCTEVPVAIHADQLTPTWRVYSTGSNVFQTRAGCL
IGAEHVNNSYECDIPIGAGICASYQTQTNSPSRAGSVASQSIIAYTMSLG
AENSVAYSNNSIAIPTNFTISVTTEILPVSMTKTSVDCTMYICGDSTECS
NLLLQYGSFCTQLNRALTGIAVEQDKNTQEVFAQVKQIYKTPPIKDFGGF
NFSQILPDPSKPSKRSFIEDLLFNKVTLADAGFlKQYGDCLGDIAARDLI
CAQKFNGLTVLPPLLTDEMIAQYTSALLAGTITSGWTFGAGPALQIPFAM
QMAYRFNGIGVTQNVLYENQKLIANQFNSAIGKIQDSLSSGPGALGKLQD
VVNQNAQALNTLVKQLSSNFGAISSVLNDILSRLDPVEAEVQIDRLlTGR
LQSLQTYVTQQLIRAAEIRASANLAATKMSECVLGQSKRVDFCGKGYHLM
SFPQSAPHGVVFLHVTYVPAQEKNFTTAPAICHDGKAHFPREGVFVSNGT
HWFVTQRNFYEPQIITTDNTFVSGNCDVVIGIVNNTVYDPLQPELDSFKE
ELDKYFKNHTSPDVDLGDISGINASVVNIQKEIDRLNEVAKNLNESLIDL
QELGKYEQ

[0232] SEQ ID NO 104: SEQ ID NO 7 + D614N + A892P + A942P + T941G + A944P + K986P

MFVFLVLLPLVSSQCVNLTTRTQLPPAYTNSFTRGVYYPDKVFRSSVLHS
TQDLFLPFFSNVTWFHAIHVSGTNGTKRFDNPVLPFNDGVYFASTEKSNI
IRGWIFGTTLDSKTQSLLlVNNATNVVIKVCEFQFCNDPFLGVYYHKNNK
SWMESEFRVYSSANNCTFEYVSQPFLMDLEGKQGNFKNLREFVFKNIDGY
FKIYSKHTPINLVRDLPQGFSALEPLVDLPIGINITRFQTLLALHRSYLT
PGDSSSGWTAGAAAYYVGYLQPRTFLLKYNENGTITDAVDCALDPLSETK
CTLKSFTVEKGIYQTSNFRVQPTESIVRFPNITNLCPFGEVFNATRFASV
YAWNRKRISNCVADYSVLYNSASFSTFKCYGVSPTKLNDLCFTNVYADSF
VIRGDEVRQIAPGQTGKIADYNYKLPDDFTGCVIAWNSNNLDSKVGGNYN
YLYRLFRKSNLKPFERDISTEIYQAGSTPCNGVEGFNCYFPLQSYGFQPT
NGVGYQPYRVVVLSFELLHAPATVCGPKKSTNLVKNKCVNFNFNGLTGTG
VLTESNKKFLPFQQFGRDIADTTDAVRDPQTLEILDITPCSFGGVSVITP
GTNTSNQVAVLYQNVNCTEVPVAIHADQLTPTWRVYSTGSNVFQTRAGCL
IGAEHVNNSYECDIPIGAGICASYQTQTNSPSRAGSVASQSIIAYTMSLG
AENSVAYSNNSIAIPTNFTISVTTEILPVSMTKTSVDCTMYICGDSTECS
NLLLQYGSFCTQLNRALTGIAVEQDKNTQEVFAQVKQIYKTPPIKDFGGF
NFSQILPDPSKPSKRSFIEDLLFNKVTLADAGFIKQYGDCLGDIAARDLI
CAQKFNGLTVLPPLLTDEMIAQYTSALLAGTITSGWTFGAGPALQIPFAM
QMAYRFNGIGVTQNVLYENQKLIANQFNSAIGKIQDSLSSGPSPLGKLQD
VVNQNAQALNTLVKQLSSNFGAISSVLNDILSRLDPVEAEVQIDRLITGR
LQSLQTYVTQQLIRAAEIRASANLAATKMSECVLGQSKRVDFCGKGYHLM
SFPQSAPHGVVFLHVTYVPAQEKNFTTAPAICHDGKAHFPREGVFVSNGT
HWFVTQRNFYEPQIITTDNTFVSGNCDVVIGIVNNTVYDPLQPELDSFKE
ELDKYFKNHTSPDVDLGDISGINASVVNIQKEIDRLNEVAKNLNESLIDL
QELGKYEQ

[0233] SEQ ID NO 105: SEQ ID NO 7 + D614N + A892P + A942P + S943G + A944P + K986P

MFVFLVLLPLVSSQCVNLTTRTQLPPAYTNSFTRGVYYPDKVFRSSVLHS
TQDLFLPFFSNVTWFHAIHVSGTNGTKRFDNPVLPFNDGVYFASTEKSNI
IRGWIFGTTLDSKTQSLLlVNNATNVVIKVCEFQFCNDPFLGVYYHKNNK
SWMESEFRVYSSANNCTFEYVSQPFLMDLEGKQGNFKNLREFVFKNIDGY
FKIYSKHTPINLVRDLPQGFSALEPLVDLPIGINITRFQTLLALHRSYLT
PGDSSSGWTAGAAAYYVGYLQPRTFLLKYNENGTITDAVDCALDPLSETK
CTLKSFTVEKGIYQTSNFRVQPTESIVRFPNITNLCPFGEVFNATRFASV
YAWNRKRISNCVADYSVLYNSASFSTFKCYGVSPTKLNDLCFTNVYADSF
VIRGDEVRQIAPGQTGKIADYNYKLPDDFTGCVIAWNSNNLDSKVGGNYN
YLYRLFRKSNLKPFERDISTEIYQAGSTPCNGVEGFNCYFPLQSYGFQPT
NGVGYQPYRVVVLSFELLHAPATVCGPKKSTNLVKNKCVNFNFNGLTGTG
VLTESNKKFLPFQQFGRDIADTTDAVRDPQTLEILDITPCSFGGVSVITP
GTNTSNQVAVLYQNVNCTEVPVAIHADQLTPTWRVYSTGSNVFQTRAGCL
IGAEHVNNSYECDIPIGAGICASYQTQTNSPSRAGSVASQSIIAYTMSLG
AENSVAYSNNSIAIPTNFTISVTTEILPVSMTKTSVDCTMYICGDSTECS
NLLLQYGSFCTQLNRALTGIAVEQDKNTQEVFAQVKQIYKTPPIKDFGGF
NFSQILPDPSKPSKRSFIEDLLFNKVTLADAGFIKQYGDCLGDIAARDLI
CAQKFNGLTVLPPLLTDEMIAQYTSALLAGTITSGWTFGAGPALQIPFAM
QMAYRFNGIGVTQNVLYENQKLIANQFNSAIGKIQDSLSSTPGPLGKLQD
VVNQNAQALNTLVKQLSSNFGAISSVLNDILSRLDPVEAEVQIDRLITGR
LQSLQTYVTQQLIRAAEIRASANLAATKMSECVLGQSKRVDFCGKGYHLM
SFPQSAPHGVVFLHVTYVPAQEKNFTTAPAICHDGKAHFPREGVFVSNGT
HWFVTQRNFYEPQIITTDNTFVSGNCDVVIGIVNNTVYDPLQPELDSFKE
ELDKYFKNHTSPDVDLGDISGINASVVNIQKEIDRLNEVAKNLNESLIDL
QELGKYEQ

[0234] SEQ ID NO 106: SEQ ID NO 7 + T941G + V987P

MFVFLVLLPLVSSQCVNLTTRTQLPPAYTNSFTRGVYYPDKVFRSSVLHS
TQDLFLPFFSNVTWFHAIHVSGTNGTKRFDNPVLPFNDGVYFASTEKSNI
IRGWIFGTTLDSKTQSLLIVNNATNVVIKVCEFQFCNDPFLGVYYHKNNK
SWMESEFRVYSSANNCTFEYVSQPFLMDLEGKQGNFKNLREFVFKNIDGY
FKIYSKHTPINLVRDLPQGFSALEPLVDLPIGINITRFQTLLALHRSYLT
PGDSSSGWTAGAAAYYVGYLQPRTFLLKYNENGTITDAVDCALDPLSETK
CTLKSFTVEKGIYQTSNFRVQPTESIVRFPNITNLCPFGEVFNATRFASV
YAWNRKRISNCVADYSVLYNSASFSTFKCYGVSPTKLNDLCFTNVYADSF
VIRGDEVRQIAPGQTGKIADYNYKLPDDFTGCVIAWNSNNLDSKVGGNYN
YLYRLFRKSNLKPFERDISTEIYQAGSTPCNGVEGFNCYFPLQSYGFQPT
NGVGYQPYRVVVLSFELLHAPATVCGPKKSTNLVKNKCVNFNFNGLTGTG
VLTESNKKFLPFQQFGRDIADTTDAVRDPQTLEILDITPCSFGGVSVITP
GTNTSNQVAVLYQDVNCTEVPVAIHADQLTPTWRVYSTGSNVFQTRAGCL
IGAEHVNNSYECDIPIGAGICASYQTQTNSPSRAGSVASQSIIAYTMSLG
AENSVAYSNNSIAIPTNFTISVTTEILPVSMTKTSVDCTMYICGDSTECS
NLLLQYGSFCTQLNRALTGIAVEQDKNTQEVFAQVKQIYKTPPIKDFGGF
NFSQILPDPSKPSKRSFIEDLLFNKVTLADAGFIKQYGDCLGDIAARDLI
CAQKFNGLTVLPPLLTDEMIAQYTSALLAGTITSGWTFGAGAALQIPFAM
QMAYRFNGIGVTQNVLYENQKLlANQFNSAIGKIQDSLSSGASALGKLQD
VVNQNAQALNTLVKQLSSNFGAISSVLNDILSRLDKPEAEVQIDRLlTGR
LQSLQTYVTQQLIRAAEIRASANLAATKMSECVLGQSKRVDFCGKGYHLM
SFPQSAPHGVVFLHVTYVPAQEKNFTTAPAICHDGKAHFPREGVFVSNGT
HWFVTQRNFYEPQIITTDNTFVSGNCDVVIGIVNNTVYDPLQPELDSFKE
ELDKYFKNHTSPDVDLGDISGINASVVNIQKEIDRLNEVAKNLNESLIDL
QELGKYEQ

[0235] SEQ ID NO 107: SEQ ID NO 7 + S943G + V987P

MFVFLVLLPLVSSQCVNLTTRTQLPPAYTNSFTRGVYYPDKVFRSSVLHS
TQDLFLPFFSNVTWFHAIHVSGTNGTKRFDNPVLPFNDGVYFASTEKSNI
IRGWIFGTTLDSKTQSLLIVNNATNVVIKVCEFQFCNDPFLGVYYHKNNK
SWMESEFRVYSSANNCTFEYVSQPFLMDLEGKQGNFKNLREFVFKNIDGY
FKIYSKHTPINLVRDLPQGFSALEPLVDLPIGINITRFQTLLALHRSYLT
PGDSSSGWTAGAAAYYVGYLQPRTFLLKYNENGTITDAVDCALDPLSETK
CTLKSFTVEKGIYQTSNFRVQPTESIVRFPNITNLCPFGEVFNATRFASV
YAWNRKRISNCVADYSVLYNSASFSTFKCYGVSPTKLNDLCFTNVYADSF
VIRGDEVRQIAPGQTGKIADYNYKLPDDFTGCVIAWNSNNLDSKVGGNYN
YLYRLFRKSNLKPFERDISTEIYQAGSTPCNGVEGFNCYFPLQSYGFQPT
NGVGYQPYRVVVLSFELLHAPATVCGPKKSTNLVKNKCVNFNFNGLTGTG
VLTESNKKFLPFQQFGRDIADTTDAVRDPQTLEILDITPCSFGGVSVITP
GTNTSNQVAVLYQDVNCTEVPVAIHADQLTPTWRVYSTGSNVFQTRAGCL
lGAEHVNNSYECDIPIGAGICASYQTQTNSPSRAGSVASQSIIAYTMSLG
AENSVAYSNNSIAIPTNFTISVTTEILPVSMTKTSVDCTMYICGDSTECS
NLLLQYGSFCTQLNRALTGIAVEQDKNTQEVFAQVKQIYKTPPIKDFGGF
NFSQILPDPSKPSKRSFIEDLLFNKVTLADAGFIKQYGDCLGDIAARDLI
CAQKFNGLTVLPPLLTDEMIAQYTSALLAGTITSGWTFGAGAALQIPFAM
QMAYRFNGIGVTQNVLYENQKLIANQFNSAIGKIQDSLSSTAGALGKLQD
VVNQNAQALNTLVKQLSSNFGAISSVLNDILSRLDKPEAEVQIDRLITGR
LQSLQTYVTQQLIRAAEIRASANLAATKMSECVLGQSKRVDFCGKGYHLM
SFPQSAPHGVVFLHVTYVPAQEKNFTTAPAICHDGKAHFPREGVFVSNGT
HWFVTQRNFYEPQIITTDNTFVSGNCDVVIGIVNNTVYDPLQPELDSFKE
ELDKYFKNHTSPDVDLGDISGINASVVNIQKEIDRLNEVAKNLNESLIDL
QELGKYEQ

[0236] SEQ ID NO 108: SEQ ID NO 7 + D614N + A892P + A942P + T941G + V987P

MFVFLVLLPLVSSQCVNLTTRTQLPPAYTNSFTRGVYYPDKVFRSSVLHS
TQDLFLPFFSNVTWFHAIHVSGTNGTKRFDNPVLPFNDGVYFASTEKSNI
IRGWIFGTTLDSKTQSLLIVNNATNVVIKVCEFQFCNDPFLGVYYHKNNK
SWMESEFRVYSSANNCTFEYVSQPFLMDLEGKQGNFKNLREFVFKNIDGY
FKIYSKHTPINLVRDLPQGFSALEPLVDLPIGINITRFQTLLALHRSYLT
PGDSSSGWTAGAAAYYVGYLQPRTFLLKYNENGTITDAVDCALDPLSETK
CTLKSFTVEKGIYQTSNFRVQPTESIVRFPNITNLCPFGEVFNATRFASV
YAWNRKRISNCVADYSVLYNSASFSTFKCYGVSPTKLNDLCFTNVYADSF
VIRGDEVRQIAPGQTGKIADYNYKLPDDFTGCVIAWNSNNLDSKVGGNYN
YLYRLFRKSNLKPFERDISTEIYQAGSTPCNGVEGFNCYFPLQSYGFQPT
NGVGYQPYRVVVLSFELLHAPATVCGPKKSTNLVKNKCVNFNFNGLTGTG
VLTESNKKFLPFQQFGRDIADTTDAVRDPQTLEILDITPCSFGGVSVITP
GTNTSNQVAVLYQNVNCTEVPVAIHADQLTPTWRVYSTGSNVFQTRAGCL
lGAEHVNNSYECDIPIGAGICASYQTQTNSPSRAGSVASQSIIAYTMSLG
AENSVAYSNNSIAIPTNFTISVTTEILPVSMTKTSVDCTMYICGDSTECS
NLLLQYGSFCTQLNRALTGIAVEQDKNTQEVFAQVKQIYKTPPIKDFGGF
NFSQILPDPSKPSKRSFIEDLLFNKVTLADAGFIKQYGDCLGDIAARDLI
CAQKFNGLTVLPPLLTDEMIAQYTSALLAGTITSGWTFGAGPALQIPFAM
QMAYRFNGIGVTQNVLYENQKLIANQFNSAIGKIQDSLSSGPSALGKLQD
VVNQNAQALNTLVKQLSSNFGAISSVLNDILSRLDKPEAEVQIDRLITGR
LQSLQTYVTQQLIRAAEIRASANLAATKMSECVLGQSKRVDFCGKGYHLM
SFPQSAPHGVVFLHVTYVPAQEKNFTTAPAICHDGKAHFPREGVFVSNGT
HWFVTQRNFYEPQIITTDNTFVSGNCDVVIGIVNNTVYDPLQPELDSFKE
ELDKYFKNHTSPDVDLGDISGINASVVNIQKEIDRLNEVAKNLNESLIDL
QELGKYEQ

[0237] SEQ ID NO 109: SEQ ID NO 7 + D614N + A892P + A942P + S943G + V987P

MFVFLVLLPLVSSQCVNLTTRTQLPPAYTNSFTRGVYYPDKVFRSSVLHS
TQDLFLPFFSNVTWFHAIHVSGTNGTKRFDNPVLPFNDGVYFASTEKSNI
IRGWIFGTTLDSKTQSLLIVNNATNVVIKVCEFQFCNDPFLGVYYHKNNK
SWMESEFRVYSSANNCTFEYVSQPFLMDLEGKQGNFKNLREFVFKNIDGY
FKIYSKHTPINLVRDLPQGFSALEPLVDLPIGINITRFQTLLALHRSYLT
PGDSSSGWTAGAAAYYVGYLQPRTFLLKYNENGTITDAVDCALDPLSETK
CTLKSFTVEKGIYQTSNFRVQPTESIVRFPNITNLCPFGEVFNATRFASV
YAWNRKRISNCVADYSVLYNSASFSTFKCYGVSPTKLNDLCFTNVYADSF
VIRGDEVRQIAPGQTGKIADYNYKLPDDFTGCVIAWNSNNLDSKVGGNYN
YLYRLFRKSNLKPFERDISTEIYQAGSTPCNGVEGFNCYFPLQSYGFQPT
NGVGYQPYRVVVLSFELLHAPATVCGPKKSTNLVKNKCVNFNFNGLTGTG
VLTESNKKFLPFQQFGRDIADTTDAVRDPQTLEILDITPCSFGGVSVITP
GTNTSNQVAVLYQNVNCTEVPVAIHADQLTPTWRVYSTGSNVFQTRAGCL
lGAEHVNNSYECDIPIGAGICASYQTQTNSPSRAGSVASQSIIAYTMSLG
AENSVAYSNNSIAIPTNFTISVTTEILPVSMTKTSVDCTMYICGDSTECS
NLLLQYGSFCTQLNRALTGIAVEQDKNTQEVFAQVKQIYKTPPIKDFGGF
NFSQILPDPSKPSKRSFIEDLLFNKVTLADAGFIKQYGDCLGDIAARDLI
CAQKFNGLTVLPPLLTDEMIAQYTSALLAGTITSGWTFGAGPALQIPFAM
QMAYRFNGIGVTQNVLYENQKLIANQFNSAlGKIQDSLSSTPGALGKLQD
VVNQNAQALNTLVKQLSSNFGAISSVLNDILSRLDKPEAEVQIDRLITGR
LQSLQTYVTQQLIRAAEIRASANLAATKMSECVLGQSKRVDFCGKGYHLM
SFPQSAPHGVVFLHVTYVPAQEKNFTTAPAICHDGKAHFPREGVFVSNGT
HWFVTQRNFYEPQIITTDNTFVSGNCDVVIGIVNNTVYDPLQPELDSFKE
ELDKYFKNHTSPDVDLGDISGINASVVNIQKEIDRLNEVAKNLNESLIDL
QELGKYEQ

[0238] SEQ ID NO 110: SEQ ID NO 7 + D614N + A892P + A942P + T941G + S943G + V987P

MFVFLVLLPLVSSQCVNLTTRTQLPPAYTNSFTRGVYYPDKVFRSSVLHS
TQDLFLPFFSNVTWFHAIHVSGTNGTKRFDNPVLPFNDGVYFASTEKSNI
IRGWIFGTTLDSKTQSLLIVNNATNVVIKVCEFQFCNDPFLGVYYHKNNK
SWMESEFRVYSSANNCTFEYVSQPFLMDLEGKQGNFKNLREFVFKNIDGY
FKIYSKHTPINLVRDLPQGFSALEPLVDLPIGINITRFQTLLALHRSYLT
PGDSSSGWTAGAAAYYVGYLQPRTFLLKYNENGTITDAVDCALDPLSETK
CTLKSFTVEKGIYQTSNFRVQPTESIVRFPNITNLCPFGEVFNATRFASV
YAWNRKRISNCVADYSVLYNSASFSTFKCYGVSPTKLNDLCFTNVYADSF
VIRGDEVRQIAPGQTGKIADYNYKLPDDFTGCVIAWNSNNLDSKVGGNYN
YLYRLFRKSNLKPFERDISTEIYQAGSTPCNGVEGFNCYFPLQSYGFQPT
NGVGYQPYRVVVLSFELLHAPATVCGPKKSTNLVKNKCVNFNFNGLTGTG
VLTESNKKFLPFQQFGRDIADTTDAVRDPQTLEILDITPCSFGGVSVITP
GTNTSNQVAVLYQNVNCTEVPVAIHADQLTPTWRVYSTGSNVFQTRAGCL
IGAEHVNNSYECDIPIGAGICASYQTQTNSPSRAGSVASQSIIAYTMSLG
AENSVAYSNNSIAIPTNFTISVTTEILPVSMTKTSVDCTMYICGDSTECS
NLLLQYGSFCTQLNRALTGIAVEQDKNTQEVFAQVKQIYKTPPIKDFGGF
NFSQILPDPSKPSKRSFIEDLLFNKVTLADAGFIKQYGDCLGDIAARDLI
CAQKFNGLTVLPPLLTDEMIAQYTSALLAGTITSGWTFGAGPALQIPFAM
QMAYRFNGIGVTQNVLYENQKLIANQFNSAIGKIQDSLSSGPGALGKLQD
VVNQNAQALNTLVKQLSSNFGAISSVLNDILSRLDKPEAEVQIDRLITGR
LQSLQTYVTQQLIRAAEIRASANLAATKMSECVLGQSKRVDFCGKGYHLM
SFPQSAPHGVVFLHVTYVPAQEKNFTTAPAICHDGKAHFPREGVFVSNGT
HWFVTQRNFYEPQIITTDNTFVSGNCDVVIGIVNNTVYDPLQPELDSFKE
ELDKYFKNHTSPDVDLGDISGINASVVNIQKEIDRLNEVAKNLNESLIDL
QELGKYEQ

[0239] SEQ ID NO 111: SEQ ID NO 7 + D614N + A892P + A942P + T941G + A944P + V987P

MFVFLVLLPLVSSQCVNLTTRTQLPPAYTNSFTRGVYYPDKVFRSSVLHS
TQDLFLPFFSNVTWFHAIHVSGTNGTKRFDNPVLPFNDGVYFASTEKSNI
IRGWIFGTTLDSKTQSLLIVNNATNVVIKVCEFQFCNDPFLGVYYHKNNK
SWMESEFRVYSSANNCTFEYVSQPFLMDLEGKQGNFKNLREFVFKNIDGY
FKIYSKHTPINLVRDLPQGFSALEPLVDLPIGINITRFQTLLALHRSYLT
PGDSSSGWTAGAAAYYVGYLQPRTFLLKYNENGTITDAVDCALDPLSETK
CTLKSFTVEKGIYQTSNFRVQPTESIVRFPNITNLCPFGEVFNATRFASV
YAWNRKRISNCVADYSVLYNSASFSTFKCYGVSPTKLNDLCFTNVYADSF
VIRGDEVRQIAPGQTGKIADYNYKLPDDFTGCVIAWNSNNLDSKVGGNYN
YLYRLFRKSNLKPFERDISTEIYQAGSTPCNGVEGFNCYFPLQSYGFQPT
NGVGYQPYRVVVLSFELLHAPATVCGPKKSTNLVKNKCVNFNFNGLTGTG
VLTESNKKFLPFQQFGRDIADTTDAVRDPQTLEILDITPCSFGGVSVITP
GTNTSNQVAVLYQNVNCTEVPVAIHADQLTPTWRVYSTGSNVFQTRAGCL
IGAEHVNNSYECDIPIGAGICASYQTQTNSPSRAGSVASQSIIAYTMSLG
AENSVAYSNNSIAIPTNFTISVTTEILPVSMTKTSVDCTMYICGDSTECS
NLLLQYGSFCTQLNRALTGIAVEQDKNTQEVFAQVKQIYKTPPIKDFGGF
NFSQILPDPSKPSKRSFIEDLLFNKVTLADAGFlKQYGDCLGDIAARDLI
CAQKFNGLTVLPPLLTDEMIAQYTSALLAGTITSGWTFGAGPALQIPFAM
QMAYRFNGIGVTQNVLYENQKLIANQFNSAIGKIQDSLSSGPSPLGKLQD
VVNQNAQALNTLVKQLSSNFGAISSVLNDILSRLDKPEAEVQIDRLlTGR
LQSLQTYVTQQLIRAAEIRASANLAATKMSECVLGQSKRVDFCGKGYHLM
SFPQSAPHGVVFLHVTYVPAQEKNFTTAPAICHDGKAHFPREGVFVSNGT
HWFVTQRNFYEPQIITTDNTFVSGNCDVVIGIVNNTVYDPLQPELDSFKE
ELDKYFKNHTSPDVDLGDISGINASVVNIQKEIDRLNEVAKNLNESLIDL
QELGKYEQ

[0240] SEQ ID NO 112: SEQ ID NO 7 + D614N + A892P + A942P + S943G + A944P + V987P

MFVFLVLLPLVSSQCVNLTTRTQLPPAYTNSFTRGVYYPDKVFRSSVLHS
TQDLFLPFFSNVTWFHAIHVSGTNGTKRFDNPVLPFNDGVYFASTEKSNI
IRGWIFGTTLDSKTQSLLIVNNATNVVIKVCEFQFCNDPFLGVYYHKNNK
SWMESEFRVYSSANNCTFEYVSQPFLMDLEGKQGNFKNLREFVFKNIDGY
FKIYSKHTPINLVRDLPQGFSALEPLVDLPIGINITRFQTLLALHRSYLT
PGDSSSGWTAGAAAYYVGYLQPRTFLLKYNENGTITDAVDCALDPLSETK
CTLKSFTVEKGIYQTSNFRVQPTESIVRFPNITNLCPFGEVFNATRFASV
YAWNRKRISNCVADYSVLYNSASFSTFKCYGVSPTKLNDLCFTNVYADSF
VIRGDEVRQIAPGQTGKIADYNYKLPDDFTGCVIAWNSNNLDSKVGGNYN
YLYRLFRKSNLKPFERDISTEIYQAGSTPCNGVEGFNCYFPLQSYGFQPT
NGVGYQPYRVVVLSFELLHAPATVCGPKKSTNLVKNKCVNFNFNGLTGTG
VLTESNKKFLPFQQFGRDIADTTDAVRDPQTLEILDITPCSFGGVSVITP
GTNTSNQVAVLYQNVNCTEVPVAIHADQLTPTWRVYSTGSNVFQTRAGCL
IGAEHVNNSYECDIPIGAGICASYQTQTNSPSRAGSVASQSIIAYTMSLG
AENSVAYSNNSIAIPTNFTISVTTEILPVSMTKTSVDCTMYICGDSTECS
NLLLQYGSFCTQLNRALTGIAVEQDKNTQEVFAQVKQIYKTPPIKDFGGF
NFSQILPDPSKPSKRSFIEDLLFNKVTLADAGFIKQYGDCLGDIAARDLI
CAQKFNGLTVLPPLLTDEMIAQYTSALLAGTITSGWTFGAGPALQIPFAM
QMAYRFNGIGVTQNVLYENQKLIANQFNSAIGKIQDSLSSTPGPLGKLQD
VVNQNAQALNTLVKQLSSNFGAISSVLNDILSRLDKPEAEVQIDRLITGR
LQSLQTYVTQQLIRAAEIRASANLAATKMSECVLGQSKRVDFCGKGYHLM
SFPQSAPHGVVFLHVTYVPAQEKNFTTAPAICHDGKAHFPREGVFVSNGT
HWFVTQRNFYEPQIITTDNTFVSGNCDVVIGIVNNTVYDPLQPELDSFKE
ELDKYFKNHTSPDVDLGDISGINASVVNIQKEIDRLNEVAKNLNESLIDL
QELGKYEQ

[0241] SEQ ID NO 113: SEQ ID NO 7 + T941G + K986P + V987P

MFVFLVLLPLVSSQCVNLTTRTQLPPAYTNSFTRGVYYPDKVFRSSVLHS
TQDLFLPFFSNVTWFHAIHVSGTNGTKRFDNPVLPFNDGVYFASTEKSNI
IRGWIFGTTLDSKTQSLLIVNNATNVVIKVCEFQFCNDPFLGVYYHKNNK
SWMESEFRVYSSANNCTFEYVSQPFLMDLEGKQGNFKNLREFVFKNIDGY
FKIYSKHTPINLVRDLPQGFSALEPLVDLPIGINITRFQTLLALHRSYLT
PGDSSSGWTAGAAAYYVGYLQPRTFLLKYNENGTITDAVDCALDPLSETK
CTLKSFTVEKGIYQTSNFRVQPTESIVRFPNITNLCPFGEVFNATRFASV
YAWNRKRISNCVADYSVLYNSASFSTFKCYGVSPTKLNDLCFTNVYADSF
VIRGDEVRQIAPGQTGKIADYNYKLPDDFTGCVIAWNSNNLDSKVGGNYN
YLYRLFRKSNLKPFERDISTEIYQAGSTPCNGVEGFNCYFPLQSYGFQPT
NGVGYQPYRVVVLSFELLHAPATVCGPKKSTNLVKNKCVNFNFNGLTGTG
VLTESNKKFLPFQQFGRDIADTTDAVRDPQTLEILDITPCSFGGVSVITP
GTNTSNQVAVLYQDVNCTEVPVAIHADQLTPTWRVYSTGSNVFQTRAGCL
IGAEHVNNSYECDIPIGAGICASYQTQTNSPSRAGSVASQSIIAYTMSLG
AENSVAYSNNSIAIPTNFTISVTTEILPVSMTKTSVDCTMYICGDSTECS
NLLLQYGSFCTQLNRALTGIAVEQDKNTQEVFAQVKQIYKTPPIKDFGGF
NFSQILPDPSKPSKRSFIEDLLFNKVTLADAGFIKQYGDCLGDIAARDLI
CAQKFNGLTVLPPLLTDEMIAQYTSALLAGTITSGWTFGAGAALQIPFAM
QMAYRFNGIGVTQNVLYENQKLIANQFNSAIGKIQDSLSSGASALGKLQD
VVNQNAQALNTLVKQLSSNFGAISSVLNDILSRLDPPEAEVQIDRLITGR
LQSLQTYVTQQLIRAAEIRASANLAATKMSECVLGQSKRVDFCGKGYHLM
SFPQSAPHGVVFLHVTYVPAQEKNFTTAPAICHDGKAHFPREGVFVSNGT
HWFVTQRNFYEPQIITTDNTFVSGNCDVVIGIVNNTVYDPLQPELDSFKE
ELDKYFKNHTSPDVDLGDISGINASVVNIQKEIDRLNEVAKNLNESLIDL
QELGKYEQ

[0242] SEQ ID NO 114: SEQ ID NO 7 + S943G + K986P + V987P

MFVFLVLLPLVSSQCVNLTTRTQLPPAYTNSFTRGVYYPDKVFRSSVLHS
TQDLFLPFFSNVTWFHAIHVSGTNGTKRFDNPVLPFNDGVYFASTEKSNI
IRGWIFGTTLDSKTQSLLIVNNATNVVIKVCEFQFCNDPFLGVYYHKNNK
SWMESEFRVYSSANNCTFEYVSQPFLMDLEGKQGNFKNLREFVFKNIDGY
FKIYSKHTPINLVRDLPQGFSALEPLVDLPIGINITRFQTLLALHRSYLT
PGDSSSGWTAGAAAYYVGYLQPRTFLLKYNENGTITDAVDCALDPLSETK
CTLKSFTVEKGIYQTSNFRVQPTESIVRFPNITNLCPFGEVFNATRFASV
YAWNRKRISNCVADYSVLYNSASFSTFKCYGVSPTKLNDLCFTNVYADSF
VIRGDEVRQIAPGQTGKIADYNYKLPDDFTGCVIAWNSNNLDSKVGGNYN
YLYRLFRKSNLKPFERDISTEIYQAGSTPCNGVEGFNCYFPLQSYGFQPT
NGVGYQPYRVVVLSFELLHAPATVCGPKKSTNLVKNKCVNFNFNGLTGTG
VLTESNKKFLPFQQFGRDIADTTDAVRDPQTLEILDITPCSFGGVSVITP
GTNTSNQVAVLYQDVNCTEVPVAIHADQLTPTWRVYSTGSNVFQTRAGCL
IGAEHVNNSYECDIPIGAGICASYQTQTNSPSRAGSVASQSIIAYTMSLG
AENSVAYSNNSIAIPTNFTISVTTEILPVSMTKTSVDCTMYICGDSTECS
NLLLQYGSFCTQLNRALTGIAVEQDKNTQEVFAQVKQIYKTPPIKDFGGF
NFSQILPDPSKPSKRSFIEDLLFNKVTLADAGFIKQYGDCLGDIAARDLI
CAQKFNGLTVLPPLLTDEMIAQYTSALLAGTITSGWTFGAGAALQIPFAM
QMAYRFNGIGVTQNVLYENQKLIANQFNSAIGKIQDSLSSTAGALGKLQD
VVNQNAQALNTLVKQLSSNFGAISSVLNDILSRLDPPEAEVQIDRLlTGR
LQSLQTYVTQQLIRAAEIRASANLAATKMSECVLGQSKRVDFCGKGYHLM
SFPQSAPHGVVFLHVTYVPAQEKNFTTAPAICHDGKAHFPREGVFVSNGT
HWFVTQRNFYEPQIITTDNTFVSGNCDVVIGIVNNTVYDPLOPELDSFKE
ELDKYFKNHTSPDVDLGDISGINASVVNIQKEIDRLNEVAKNLNESLIDL
QELGKYEQ

[0243] SEQ ID NO 115: SEQ ID NO 7 + D614N + A892P + A942P + T941G + K986P + V987P

MFVFLVLLPLVSSQCVNLTTRTQLPPAYTNSFTRGVYYPDKVFRSSVLHS
TQDLFLPFFSNVTWFHAIHVSGTNGTKRFDNPVLPFNDGVYFASTEKSNI
IRGWIFGTTLDSKTQSLLIVNNATNVVIKVCEFQFCNDPFLGVYYHKNNK
SWMESEFRVYSSANNCTFEYVSQPFLMDLEGKQGNFKNLREFVFKNIDGY
FKIYSKHTPINLVRDLPQGFSALEPLVDLPIGINITRFQTLLALHRSYLT
PGDSSSGWTAGAAAYYVGYLQPRTFLLKYNENGTITDAVDCALDPLSETK
CTLKSFTVEKGIYQTSNFRVQPTESIVRFPNITNLCPFGEVFNATRFASV
YAWNRKRISNCVADYSVLYNSASFSTFKCYGVSPTKLNDLCFTNVYADSF
VIRGDEVRQIAPGQTGKIADYNYKLPDDFTGCVIAWNSNNLDSKVGGNYN
YLYRLFRKSNLKPFERDISTEIYQAGSTPCNGVEGFNCYFPLQSYGFQPT
NGVGYQPYRVVVLSFELLHAPATVCGPKKSTNLVKNKCVNFNFNGLTGTG
VLTESNKKFLPFQQFGRDIADTTDAVRDPQTLEILDITPCSFGGVSVITP
GTNTSNQVAVLYQNVNCTEVPVAIHADQLTPTWRVYSTGSNVFQTRAGCL
lGAEHVNNSYECDIPIGAGICASYQTQTNSPSRAGSVASQSIIAYTMSLG
AENSVAYSNNSIAIPTNFTISVTTEILPVSMTKTSVDCTMYICGDSTECS
NLLLQYGSFCTQLNRALTGIAVEQDKNTQEVFAQVKQIYKTPPIKDFGGF
NFSQILPDPSKPSKRSFIEDLLFNKVTLADAGFIKQYGDCLGDIAARDLI
CAQKFNGLTVLPPLLTDEMIAQYTSALLAGTITSGWTFGAGPALQIPFAM
QMAYRFNGIGVTQNVLYENQKLIANQFNSAIGKIQDSLSSGPSALGKLQD
VVNQNAQALNTLVKQLSSNFGAISSVLNDILSRLDPPEAEVQIDRLITGR
LQSLQTYVTQQLIRAAEIRASANLAATKMSECVLGQSKRVDFCGKGYHLM
SFPQSAPHGVVFLHVTYVPAQEKNFTTAPAICHDGKAHFPREGVFVSNGT
HWFVTQRNFYEPQIITTDNTFVSGNCDVVIGIVNNTVYDPLQPELDSFKE
ELDKYFKNHTSPDVDLGDISGINASVVNIQKEIDRLNEVAKNLNESLIDL
QELGKYEQ

[0244] SEQ ID NO 116: SEQ ID NO 7 + D614N + A892P + A942P + S943G + K986P + V987P

MFVFLVLLPLVSSQCVNLTTRTQLPPAYTNSFTRGVYYPDKVFRSSVLHS
TQDLFLPFFSNVTWFHAIHVSGTNGTKRFDNPVLPFNDGVYFASTEKSNI
IRGWIFGTTLDSKTQSLLIVNNATNVVIKVCEFQFCNDPFLGVYYHKNNK
SWMESEFRVYSSANNCTFEYVSQPFLMDLEGKQGNFKNLREFVFKNIDGY
FKIYSKHTPINLVRDLPQGFSALEPLVDLPIGINITRFQTLLALHRSYLT
PGDSSSGWTAGAAAYYVGYLQPRTFLLKYNENGTITDAVDCALDPLSETK
CTLKSFTVEKGIYQTSNFRVQPTESIVRFPNITNLCPFGEVFNATRFASV
YAWNRKRISNCVADYSVLYNSASFSTFKCYGVSPTKLNDLCFTNVYADSF
VIRGDEVRQIAPGQTGKIADYNYKLPDDFTGCVIAWNSNNLDSKVGGNYN
YLYRLFRKSNLKPFERDISTEIYQAGSTPCNGVEGFNCYFPLQSYGFQPT
NGVGYQPYRVVVLSFELLHAPATVCGPKKSTNLVKNKCVNFNFNGLTGTG
VLTESNKKFLPFQQFGRDIADTTDAVRDPQTLEILDITPCSFGGVSVITP
GTNTSNQVAVLYQNVNCTEVPVAIHADQLTPTWRVYSTGSNVFQTRAGCL
IGAEHVNNSYECDIPIGAGICASYQTQTNSPSRAGSVASQSIIAYTMSLG
AENSVAYSNNSIAIPTNFTISVTTEILPVSMTKTSVDCTMYICGDSTECS
NLLLQYGSFCTQLNRALTGIAVEQDKNTQEVFAQVKQIYKTPPIKDFGGF
NFSQILPDPSKPSKRSFIEDLLFNKVTLADAGFIKQYGDCLGDIAARDLI
CAQKFNGLTVLPPLLTDEMIAQYTSALLAGTITSGWTFGAGPALQIPFAM
QMAYRFNGIGVTQNVLYENQKLIANQFNSAlGKIQDSLSSTPGALGKLQD
VVNQNAQALNTLVKQLSSNFGAISSVLNDILSRLDPPEAEVQIDRLITGR
LQSLQTYVTQQLIRAAEIRASANLAATKMSECVLGQSKRVDFCGKGYHLM
SFPQSAPHGVVFLHVTYVPAQEKNFTTAPAICHDGKAHFPREGVFVSNGT
HWFVTQRNFYEPQIITTDNTFVSGNCDVVIGIVNNTVYDPLQPELDSFKE
ELDKYFKNHTSPDVDLGDISGINASVVNIQKEIDRLNEVAKNLNESLIDL
QELGKYEQ

[0245] SEQ ID NO 117: SEQ ID NO 7 + D614N + A892P + A942P + T941G + S943G + K986P + V987P

MFVFLVLLPLVSSQCVNLTTRTQLPPAYTNSFTRGVYYPDKVFRSSVLHS
TQDLFLPFFSNVTWFHAIHVSGTNGTKRFDNPVLPFNDGVYFASTEKSNI
IRGWIFGTTLDSKTQSLLIVNNATNVVIKVCEFQFCNDPFLGVYYHKNNK
SWMESEFRVYSSANNCTFEYVSQPFLMDLEGKQGNFKNLREFVFKNIDGY
FKIYSKHTPINLVRDLPQGFSALEPLVDLPIGINITRFQTLLALHRSYLT
PGDSSSGWTAGAAAYYVGYLQPRTFLLKYNENGTITDAVDCALDPLSETK
CTLKSFTVEKGIYQTSNFRVQPTESIVRFPNITNLCPFGEVFNATRFASV
YAWNRKRISNCVADYSVLYNSASFSTFKCYGVSPTKLNDLCFTNVYADSF
VIRGDEVRQIAPGQTGKIADYNYKLPDDFTGCVIAWNSNNLDSKVGGNYN
YLYRLFRKSNLKPFERDISTEIYQAGSTPCNGVEGFNCYFPLQSYGFQPT
NGVGYQPYRVVVLSFELLHAPATVCGPKKSTNLVKNKCVNFNFNGLTGTG
VLTESNKKFLPFQQFGRDIADTTDAVRDPQTLEILDITPCSFGGVSVITP
GTNTSNQVAVLYQNVNCTEVPVAIHADQLTPTWRVYSTGSNVFQTRAGCL
IGAEHVNNSYECDIPIGAGICASYQTQTNSPSRAGSVASQSIIAYTMSLG
AENSVAYSNNSIAIPTNFTISVTTEILPVSMTKTSVDCTMYICGDSTECS
NLLLQYGSFCTQLNRALTGIAVEQDKNTQEVFAQVKQIYKTPPIKDFGGF
NFSQILPDPSKPSKRSFIEDLLFNKVTLADAGFIKQYGDCLGDIAARDLI
CAQKFNGLTVLPPLLTDEMIAQYTSALLAGTITSGWTFGAGPALQIPFAM
QMAYRFNGIGVTQNVLYENQKLIANQFNSAIGKIQDSLSSGPGALGKLQD
VVNQNAQALNTLVKQLSSNFGAISSVLNDILSRLDPPEAEVQIDRLITGR
LQSLQTYVTQQLIRAAEIRASANLAATKMSECVLGQSKRVDFCGKGYHLM
SFPQSAPHGVVFLHVTYVPAQEKNFTTAPAICHDGKAHFPREGVFVSNGT
HWFVTQRNFYEPQIITTDNTFVSGNCDVVIGIVNNTVYDPLQPELDSFKE
ELDKYFKNHTSPDVDLGDISGINASVVNIQKEIDRLNEVAKNLNESLIDL
QELGKYEQ

[0246] SEQ ID NO 118: SEQ ID NO 7 + D614N + A892P + A942P + T941G + A944P + K986P + V987P

MFVFLVLLPLVSSQCVNLTTRTQLPPAYTNSFTRGVYYPDKVFRSSVLHS
TQDLFLPFFSNVTWFHAIHVSGTNGTKRFDNPVLPFNDGVYFASTEKSNI
IRGWIFGTTLDSKTQSLLIVNNATNVVIKVCEFQFCNDPFLGVYYHKNNK
SWMESEFRVYSSANNCTFEYVSQPFLMDLEGKQGNFKNLREFVFKNIDGY
FKIYSKHTPINLVRDLPQGFSALEPLVDLPIGINITRFQTLLALHRSYLT
PGDSSSGWTAGAAAYYVGYLQPRTFLLKYNENGTITDAVDCALDPLSETK
CTLKSFTVEKGIYQTSNFRVQPTESIVRFPNITNLCPFGEVFNATRFASV
YAWNRKRISNCVADYSVLYNSASFSTFKCYGVSPTKLNDLCFTNVYADSF
VIRGDEVRQIAPGQTGKIADYNYKLPDDFTGCVIAWNSNNLDSKVGGNYN
YLYRLFRKSNLKPFERDISTEIYQAGSTPCNGVEGFNCYFPLQSYGFQPT
NGVGYQPYRVVVLSFELLHAPATVCGPKKSTNLVKNKCVNFNFNGLTGTG
VLTESNKKFLPFQQFGRDIADTTDAVRDPQTLEILDITPCSFGGVSVITP
GTNTSNQVAVLYQNVNCTEVPVAIHADQLTPTWRVYSTGSNVFQTRAGCL
IGAEHVNNSYECDIPIGAGICASYQTQTNSPSRAGSVASQSIIAYTMSLG
AENSVAYSNNSIAIPTNFTISVTTEILPVSMTKTSVDCTMYICGDSTECS
NLLLQYGSFCTQLNRALTGIAVEQDKNTQEVFAQVKQIYKTPPIKDFGGF
NFSQILPDPSKPSKRSFIEDLLFNKVTLADAGFIKQYGDCLGDIAARDLI
CAQKFNGLTVLPPLLTDEMIAQYTSALLAGTITSGWTFGAGPALQIPFAM
QMAYRFNGIGVTQNVLYENQKLIANQFNSAIGKIQDSLSSGPSPLGKLQD
VVNQNAQALNTLVKQLSSNFGAISSVLNDILSRLDPPEAEVQIDRLITGR
LQSLQTYVTQQLIRAAEIRASANLAATKMSECVLGQSKRVDFCGKGYHLM
SFPQSAPHGVVFLHVTYVPAQEKNFTTAPAICHDGKAHFPREGVFVSNGT
HWFVTQRNFYEPQIITTDNTFVSGNCDVVIGIVNNTVYDPLQPELDSFKE
ELDKYFKNHTSPDVDLGDISGINASVVNIQKEIDRLNEVAKNLNESLIDL
QELGKYEQ

[0247] SEQ ID NO 119: SEQ ID NO 7 + D614N + A892P + A942P + S943G + A944P + K986P + V987P

MFVFLVLLPLVSSQCVNLTTRTQLPPAYTNSFTRGVYYPDKVFRSSVLHS
TQDLFLPFFSNVTWFHAIHVSGTNGTKRFDNPVLPFNDGVYFASTEKSNI
IRGWIFGTTLDSKTQSLLlVNNATNVVIKVCEFQFCNDPFLGVYYHKNNK
SWMESEFRVYSSANNCTFEYVSQPFLMDLEGKQGNFKNLREFVFKNIDGY
FKIYSKHTPINLVRDLPQGFSALEPLVDLPIGINITRFQTLLALHRSYLT
PGDSSSGWTAGAAAYYVGYLQPRTFLLKYNENGTITDAVDCALDPLSETK
CTLKSFTVEKGIYQTSNFRVQPTESIVRFPNITNLCPFGEVFNATRFASV
YAWNRKRISNCVADYSVLYNSASFSTFKCYGVSPTKLNDLCFTNVYADSF
VIRGDEVRQIAPGQTGKIADYNYKLPDDFTGCVIAWNSNNLDSKVGGNYN
YLYRLFRKSNLKPFERDISTElYQAGSTPCNGVEGFNCYFPLQSYGFQPT
NGVGYQPYRVVVLSFELLHAPATVCGPKKSTNLVKNKCVNFNFNGLTGTG
VLTESNKKFLPFQQFGRDIADTTDAVRDPQTLElLDITPCSFGGVSVITP
GTNTSNQVAVLYQNVNCTEVPVAIHADQLTPTWRVYSTGSNVFQTRAGCL
IGAEHVNNSYECDIPIGAGICASYQTQTNSPSRAGSVASQSIIAYTMSLG
AENSVAYSNNSIAIPTNFTISVTTEILPVSMTKTSVDCTMYICGDSTECS
NLLLQYGSFCTQLNRALTGIAVEQDKNTQEVFAQVKQIYKTPPIKDFGGF
NFSQILPDPSKPSKRSFIEDLLFNKVTLADAGFIKQYGDCLGDIAARDLI
CAQKFNGLTVLPPLLTDEMIAQYTSALLAGTITSGWTFGAGPALQIPFAM
QMAYRFNGIGVTQNVLYENQKLIANQFNSAIGKIQDSLSSTPGPLGKLQD
VVNQNAQALNTLVKQLSSNFGAISSVLNDILSRLDPPEAEVQIDRLITGR
LQSLQTYVTQQLIRAAEIRASANLAATKMSECVLGQSKRVDFCGKGYHLM
SFPQSAPHGVVFLHVTYVPAQEKNFTTAPAICHDGKAHFPREGVFVSNGT
HWFVTQRNFYEPQIITTDNTFVSGNCDVVIGIVNNTVYDPLQPELDSFKE
ELDKYFKNHTSPDVDLGDISGINASVVNIQKEIDRLNEVAKNLNESLIDL
QELGKYEQ

1. A recombinant pre-fusion SARS CoV-2 S protein, or a fragment thereof, comprising an S1 and an S2 domain, and comprising at least one mutation selected from the group consisting of a mutation of at least one amino acid in the loop region corresponding to amino acid residues 941 - 945 into G and a disulfide bridge between residues 970 and 999, wherein the numbering of the amino acid positions is according to the numbering of the amino acid positions in SEQ ID NO: 1.

2. The protein according to claim 1, wherein the at least one mutation in the loop region corresponding to amino acid residues 941 - 945 is a mutation of the amino acid at position 941 into G.

3. The protein according to claim 1, wherein the at least one mutation in the loop region corresponding to amino acid residues 941 - 945 is a mutation of the amino acid at position 943 into G.

4. The protein according to claim 1, wherein the at least one mutation in the loop region corresponding to amino acid residues 941 - 945 is a mutation of the amino acid at position 944 into G.

5. The protein according to claim 1, further comprising a deletion of the furin cleavage site.

6. The protein according to claim 5, wherein the deletion of the furin cleavage site comprises a mutation of the amino acid at position 682 into S and/or a mutation of the amino acid at position 685 into G.

7. The protein according to claim 1, further comprising a mutation of the amino acids at position 986 and/or 987 into P.

8. The protein according to claim 1, comprising an amino acid sequence selected from the group consisting of SEQ ID NO: 8-119, or a fragment thereof.

9. The protein according to claim 1, wherein the proteins do not comprise a signal peptide or a tag sequence.

10. The protein according to claim 1, comprising a truncated S2 domain.

11. The protein according to claim 10, wherein the transmembrane and cytoplasmic domain have been removed.

12. The protein according to claim 10, wherein a heterologous trimerization domain has been linked to the truncated S2 domain.

13. The protein according to claim 12, wherein the heterologous trimerization domain is a foldon domain comprising the amino acid sequence of SEQ ID NO:4.

14. A nucleic acid molecule encoding a protein according to claim 1.

15. The nucleic acid according to claim 14, wherein the nucleic acid molecule is DNA or RNA.

16. A vector comprising a nucleic acid according to claim 14.

17. The vector according to claim 16, wherein the vector is a human recombinant adenoviral vector.

18. A composition comprising a protein according to claim 1 .

19. A vaccine against COVID-19 comprising a protein according to claim 1 .

20. A method for preventing COVID-19, the method comprising administering to the subject a vaccine according to claim 19.

21. A method for reducing infection and/or replication of SARS-CoV-2 in a subject, comprising administering to the subject a composition according to claim 18 .

22. An isolated host cell comprising a nucleic acid according to claim 14.

23. An isolated host cell comprising a recombinant human adenovirus of serotype 26 comprising a nucleic acid according to claim 14.

The application's sequence listing, which the Patent Office published only in electronic form, follows.

SEQUENCE LISTING (120 sequences)

SEQ ID NO: 1 - protein, 1273 aa, Severe acute respiratory syndrome coronavirus 2
MFVFLVLLPLVSSQCVNLTTRTQLPPAYTNSFTRGVYYPDKVFRSSVLHSTQDLFLPFFSNVTWFHAIHVSGTNGTKRFDNPVLPFNDGVYFASTEKSNIIRGWIFGTTLDSKTQSLLIVNNATNVVIKVCEFQFCNDPFLGVYYHKNNKSWMESEFRVYSSANNCTFEYVSQPFLMDLEGKQGNFKNLREFVFKNIDGYFKIYSKHTPINLVRDLPQGFSALEPLVDLPIGINITRFQTLLALHRSYLTPGDSSSGWTAGAAAYYVGYLQPRTFLLKYNENGTITDAVDCALDPLSETKCTLKSFTVEKGIYQTSNFRVQPTESIVRFPNITNLCPFGEVFNATRFASVYAWNRKRISNCVADYSVLYNSASFSTFKCYGVSPTKLNDLCFTNVYADSFVIRGDEVRQIAPGQTGKIADYNYKLPDDFTGCVIAWNSNNLDSKVGGNYNYLYRLFRKSNLKPFERDISTEIYQAGSTPCNGVEGFNCYFPLQSYGFQPTNGVGYQPYRVVVLSFELLHAPATVCGPKKSTNLVKNKCVNFNFNGLTGTGVLTESNKKFLPFQQFGRDIADTTDAVRDPQTLEILDITPCSFGGVSVITPGTNTSNQVAVLYQDVNCTEVPVAIHADQLTPTWRVYSTGSNVFQTRAGCLIGAEHVNNSYECDIPIGAGICASYQTQTNSPRRARSVASQSIIAYTMSLGAENSVAYSNNSIAIPTNFTISVTTEILPVSMTKTSVDCTMYICGDSTECSNLLLQYGSFCTQLNRALTGIAVEQDKNTQEVFAQVKQIYKTPPIKDFGGFNFSQILPDPSKPSKRSFIEDLLFNKVTLADAGFIKQYGDCLGDIAARDLICAQKFNGLTVLPPLLTDEMIAQYTSALLAGTITSGWTFGAGAALQIPFAMQMAYRFNGIGVTQNVLYENQKLIANQFNSAIGKIQDSLSSTASALGKLQDVVNQNAQALNTLVKQLSSNFGAISSVLNDILSRLDKVEAEVQIDRLITGRLQSLQTYVTQQLIRAAEIRASANLAATKMSECVLGQSKRVDFCGKGYHLMSFPQSAPHGVVFLHVTYVPAQEKNFTTAPAICHDGKAHFPREGVFVSNGTHWFVTQRNFYEPQIITTDNTFVSGNCDVVIGIVNNTVYDPLQPELDSFKEELDKYFKNHTSPDVDLGDISGINASVVNIQKEIDRLNEVAKNLNESLIDLQELGKYEQYIKWPWYIWLGFIAGLIAIVMVTIMLCCMTSCCSCLKGCCSCGSCCKFDEDDSEPVLKGVKLHYT

SEQ ID NO: 2 - protein, 1297 aa, Artificial Sequence
  source: /note="Description of Artificial Sequence: Synthetic polypeptide"
MFVFLVLLPLVSSQCVNLTTRTQLPPAYTNSFTRGVYYPDKVFRSSVLHSTQDLFLPFFSNVTWFHAIHVSGTNGTKRFDNPVLPFNDGVYFASTEKSNIIRGWIFGTTLDSKTQSLLIVNNATNVVIKVCEFQFCNDPFLGVYYHKNNKSWMESEFRVYSSANNCTFEYVSQPFLMDLEGKQGNFKNLREFVFKNIDGYFKIYSKHTPINLVRDLPQGFSALEPLVDLPIGINITRFQTLLALHRSYLTPGDSSSGWTAGAAAYYVGYLQPRTFLLKYNENGTITDAVDCALDPLSETKCTLKSFTVEKGIYQTSNFRVQPTESIVRFPNITNLCPFGEVFNATRFASVYAWNRKRISNCVADYSVLYNSASFSTFKCYGVSPTKLNDLCFTNVYADSFVIRGDEVRQIAPGQTGKIADYNYKLPDDFTGCVIAWNSNNLDSKVGGNYNYLYRLFRKSNLKPFERDISTEIYQAGSTPCNGVEGFNCYFPLQSYGFQPTNGVGYQPYRVVVLSFELLHAPATVCGPKKSTNLVKNKCVNFNFNGLTGTGVLTESNKKFLPFQQFGRDIADTTDAVRDPQTLEILDITPCSFGGVSVITPGTNTSNQVAVLYQDVNCTEVPVAIHADQLTPTWRVYSTGSNVFQTRAGCLIGAEHVNNSYECDIPIGAGICASYQTQTNSPSRAGSVASQSIIAYTMSLGAENSVAYSNNSIAIPTNFTISVTTEILPVSMTKTSVDCTMYICGDSTECSNLLLQYGSFCTQLNRALTGIAVEQDKNTQEVFAQVKQIYKTPPIKDFGGFNFSQILPDPSKPSKRSFIEDLLFNKVTLADAGFIKQYGDCLGDIAARDLICAQKFNGLTVLPPLLTDEMIAQYTSALLAGTITSGWTFGAGAALQIPFAMQMAYRFNGIGVTQNVLYENQKLIANQFNSAIGKIQDSLSSTASALGKLQDVVNQNAQALNTLVKQLSSNFGAISSVLNDILSRLDKVEAEVQIDRLITGRLQSLQTYVTQQLIRAAEIRASANLAATKMSECVLGQSKRVDFCGKGYHLMSFPQSAPHGVVFLHVTYVPAQEKNFTTAPAICHDGKAHFPREGVFVSNGTHWFVTQRNFYEPQIITTDNTFVSGNCDVVIGIVNNTVYDPLQPELDSFKEELDKYFKNHTSPDVDLGDISGINASVVNIQKEIDRLNEVAKNLNESLIDLQELGKYEQGSGYIPEAPRDGQAYVRKDGEWVLLSTFLGRSLEVLFQGPGSLPETGGGSDYKDDDDKGGGGSGGGGSGGGGSGGGGSGGGGSHHHHHH

SEQ ID NO: 3 - protein, 1297 aa, Artificial Sequence
  source: /note="Description of Artificial Sequence: Synthetic polypeptide"
MFVFLVLLPLVSSQCVNLTTRTQLPPAYTNSFTRGVYYPDKVFRSSVLHSTQDLFLPFFSNVTWFHAIHVSGTNGTKRFDNPVLPFNDGVYFASTEKSNIIRGWIFGTTLDSKTQSLLIVNNATNVVIKVCEFQFCNDPFLGVYYHKNNKSWMESEFRVYSSANNCTFEYVSQPFLMDLEGKQGNFKNLREFVFKNIDGYFKIYSKHTPINLVRDLPQGFSALEPLVDLPIGINITRFQTLLALHRSYLTPGDSSSGWTAGAAAYYVGYLQPRTFLLKYNENGTITDAVDCALDPLSETKCTLKSFTVEKGIYQTSNFRVQPTESIVRFPNITNLCPFGEVFNATRFASVYAWNRKRISNCVADYSVLYNSASFSTFKCYGVSPTKLNDLCFTNVYADSFVIRGDEVRQIAPGQTGKIADYNYKLPDDFTGCVIAWNSNNLDSKVGGNYNYLYRLFRKSNLKPFERDISTEIYQAGSTPCNGVEGFNCYFPLQSYGFQPTNGVGYQPYRVVVLSFELLHAPATVCGPKKSTNLVKNKCVNFNFNGLTGTGVLTESNKKFLPFQQFGRDIADTTDAVRDPQTLEILDITPCSFGGVSVITPGTNTSNQVAVLYQDVNCTEVPVAIHADQLTPTWRVYSTGSNVFQTRAGCLIGAEHVNNSYECDIPIGAGICASYQTQTNSPSRAGSVASQSIIAYTMSLGAENSVAYSNNSIAIPTNFTISVTTEILPVSMTKTSVDCTMYICGDSTECSNLLLQYGSFCTQLNRALTGIAVEQDKNTQEVFAQVKQIYKTPPIKDFGGFNFSQILPDPSKPSKRSFIEDLLFNKVTLADAGFIKQYGDCLGDIAARDLICAQKFNGLTVLPPLLTDEMIAQYTSALLAGTITSGWTFGAGAALQIPFAMQMAYRFNGIGVTQNVLYENQKLIANQFNSAIGKIQDSLSSTASALGKLQDVVNQNAQALNTLVKQLSSNFGAISSVLNDILSRLDPPEAEVQIDRLITGRLQSLQTYVTQQLIRAAEIRASANLAATKMSECVLGQSKRVDFCGKGYHLMSFPQSAPHGVVFLHVTYVPAQEKNFTTAPAICHDGKAHFPREGVFVSNGTHWFVTQRNFYEPQIITTDNTFVSGNCDVVIGIVNNTVYDPLQPELDSFKEELDKYFKNHTSPDVDLGDISGINASVVNIQKEIDRLNEVAKNLNESLIDLQELGKYEQGSGYIPEAPRDGQAYVRKDGEWVLLSTFLGRSLEVLFQGPGSLPETGGGSDYKDDDDKGGGGSGGGGSGGGGSGGGGSGGGGSHHHHHH

SEQ ID NO: 4 - protein, 27 aa, Artificial Sequence
  source: /note="Description of Artificial Sequence: Synthetic peptide"
GYIPEAPRDGQAYVRKDGEWVLLSTFL

SEQ ID NO: 5 - protein, 1208 aa, Severe acute respiratory syndrome coronavirus 2
MFVFLVLLPLVSSQCVNLTTRTQLPPAYTNSFTRGVYYPDKVFRSSVLHSTQDLFLPFFSNVTWFHAIHVSGTNGTKRFDNPVLPFNDGVYFASTEKSNIIRGWIFGTTLDSKTQSLLIVNNATNVVIKVCEFQFCNDPFLGVYYHKNNKSWMESEFRVYSSANNCTFEYVSQPFLMDLEGKQGNFKNLREFVFKNIDGYFKIYSKHTPINLVRDLPQGFSALEPLVDLPIGINITRFQTLLALHRSYLTPGDSSSGWTAGAAAYYVGYLQPRTFLLKYNENGTITDAVDCALDPLSETKCTLKSFTVEKGIYQTSNFRVQPTESIVRFPNITNLCPFGEVFNATRFASVYAWNRKRISNCVADYSVLYNSASFSTFKCYGVSPTKLNDLCFTNVYADSFVIRGDEVRQIAPGQTGKIADYNYKLPDDFTGCVIAWNSNNLDSKVGGNYNYLYRLFRKSNLKPFERDISTEIYQAGSTPCNGVEGFNCYFPLQSYGFQPTNGVGYQPYRVVVLSFELLHAPATVCGPKKSTNLVKNKCVNFNFNGLTGTGVLTESNKKFLPFQQFGRDIADTTDAVRDPQTLEILDITPCSFGGVSVITPGTNTSNQVAVLYQDVNCTEVPVAIHADQLTPTWRVYSTGSNVFQTRAGCLIGAEHVNNSYECDIPIGAGICASYQTQTNSPRRARSVASQSIIAYTMSLGAENSVAYSNNSIAIPTNFTISVTTEILPVSMTKTSVDCTMYICGDSTECSNLLLQYGSFCTQLNRALTGIAVEQDKNTQEVFAQVKQIYKTPPIKDFGGFNFSQILPDPSKPSKRSFIEDLLFNKVTLADAGFIKQYGDCLGDIAARDLICAQKFNGLTVLPPLLTDEMIAQYTSALLAGTITSGWTFGAGAALQIPFAMQMAYRFNGIGVTQNVLYENQKLIANQFNSAIGKIQDSLSSTASALGKLQDVVNQNAQALNTLVKQLSSNFGAISSVLNDILSRLDKVEAEVQIDRLITGRLQSLQTYVTQQLIRAAEIRASANLAATKMSECVLGQSKRVDFCGKGYHLMSFPQSAPHGVVFLHVTYVPAQEKNFTTAPAICHDGKAHFPREGVFVSNGTHWFVTQRNFYEPQIITTDNTFVSGNCDVVIGIVNNTVYDPLQPELDSFKEELDKYFKNHTSPDVDLGDISGINASVVNIQKEIDRLNEVAKNLNESLIDLQELGKYEQ

SEQ ID NO: 6 - protein, 1273 aa, Artificial Sequence
  source: /note="Description of Artificial Sequence: Synthetic polypeptide"
MFVFLVLLPLVSSQCVNLTTRTQLPPAYTNSFTRGVYYPDKVFRSSVLHSTQDLFLPFFSNVTWFHAIHVSGTNGTKRFDNPVLPFNDGVYFASTEKSNIIRGWIFGTTLDSKTQSLLIVNNATNVVIKVCEFQFCNDPFLGVYYHKNNKSWMESEFRVYSSANNCTFEYVSQPFLMDLEGKQGNFKNLREFVFKNIDGYFKIYSKHTPINLVRDLPQGFSALEPLVDLPIGINITRFQTLLALHRSYLTPGDSSSGWTAGAAAYYVGYLQPRTFLLKYNENGTITDAVDCALDPLSETKCTLKSFTVEKGIYQTSNFRVQPTESIVRFPNITNLCPFGEVFNATRFASVYAWNRKRISNCVADYSVLYNSASFSTFKCYGVSPTKLNDLCFTNVYADSFVIRGDEVRQIAPGQTGKIADYNYKLPDDFTGCVIAWNSNNLDSKVGGNYNYLYRLFRKSNLKPFERDISTEIYQAGSTPCNGVEGFNCYFPLQSYGFQPTNGVGYQPYRVVVLSFELLHAPATVCGPKKSTNLVKNKCVNFNFNGLTGTGVLTESNKKFLPFQQFGRDIADTTDAVRDPQTLEILDITPCSFGGVSVITPGTNTSNQVAVLYQDVNCTEVPVAIHADQLTPTWRVYSTGSNVFQTRAGCLIGAEHVNNSYECDIPIGAGICASYQTQTNSPSRAGSVASQSIIAYTMSLGAENSVAYSNNSIAIPTNFTISVTTEILPVSMTKTSVDCTMYICGDSTECSNLLLQYGSFCTQLNRALTGIAVEQDKNTQEVFAQVKQIYKTPPIKDFGGFNFSQILPDPSKPSKRSFIEDLLFNKVTLADAGFIKQYGDCLGDIAARDLICAQKFNGLTVLPPLLTDEMIAQYTSALLAGTITSGWTFGAGAALQIPFAMQMAYRFNGIGVTQNVLYENQKLIANQFNSAIGKIQDSLSSTASALGKLQDVVNQNAQALNTLVKQLSSNFGAISSVLNDILSRLDKVEAEVQIDRLITGRLQSLQTYVTQQLIRAAEIRASANLAATKMSECVLGQSKRVDFCGKGYHLMSFPQSAPHGVVFLHVTYVPAQEKNFTTAPAICHDGKAHFPREGVFVSNGTHWFVTQRNFYEPQIITTDNTFVSGNCDVVIGIVNNTVYDPLQPELDSFKEELDKYFKNHTSPDVDLGDISGINASVVNIQKEIDRLNEVAKNLNESLIDLQELGKYEQYIKWPWYIWLGFIAGLIAIVMVTIMLCCMTSCCSCLKGCCSCGSCCKFDEDDSEPVLKGVKLHYT

SEQ ID NO: 7 - protein, 1208 aa, Artificial Sequence
  source: /note="Description of Artificial Sequence: Synthetic polypeptide"
MFVFLVLLPLVSSQCVNLTTRTQLPPAYTNSFTRGVYYPDKVFRSSVLHSTQDLFLPFFSNVTWFHAIHVSGTNGTKRFDNPVLPFNDGVYFASTEKSNIIRGWIFGTTLDSKTQSLLIVNNATNVVIKVCEFQFCNDPFLGVYYHKNNKSWMESEFRVYSSANNCTFEYVSQPFLMDLEGKQGNFKNLREFVFKNIDGYFKIYSKHTPINLVRDLPQGFSALEPLVDLPIGINITRFQTLLALHRSYLTPGDSSSGWTAGAAAYYVGYLQPRTFLLKYNENGTITDAVDCALDPLSETKCTLKSFTVEKGIYQTSNFRVQPTESIVRFPNITNLCPFGEVFNATRFASVYAWNRKRISNCVADYSVLYNSASFSTFKCYGVSPTKLNDLCFTNVYADSFVIRGDEVRQIAPGQTGKIADYNYKLPDDFTGCVIAWNSNNLDSKVGGNYNYLYRLFRKSNLKPFERDISTEIYQAGSTPCNGVEGFNCYFPLQSYGFQPTNGVGYQPYRVVVLSFELLHAPATVCGPKKSTNLVKNKCVNFNFNGLTGTGVLTESNKKFLPFQQFGRDIADTTDAVRDPQTLEILDITPCSFGGVSVITPGTNTSNQVAVLYQDVNCTEVPVAIHADQLTPTWRVYSTGSNVFQTRAGCLIGAEHVNNSYECDIPIGAGICASYQTQTNSPSRAGSVASQSIIAYTMSLGAENSVAYSNNSIAIPTNFTISVTTEILPVSMTKTSVDCTMYICGDSTECSNLLLQYGSFCTQLNRALTGIAVEQDKNTQEVFAQVKQIYKTPPIKDFGGFNFSQILPDPSKPSKRSFIEDLLFNKVTLADAGFIKQYGDCLGDIAARDLICAQKFNGLTVLPPLLTDEMIAQYTSALLAGTITSGWTFGAGAALQIPFAMQMAYRFNGIGVTQNVLYENQKLIANQFNSAIGKIQDSLSSTASALGKLQDVVNQNAQALNTLVKQLSSNFGAISSVLNDILSRLDKVEAEVQIDRLITGRLQSLQTYVTQQLIRAAEIRASANLAATKMSECVLGQSKRVDFCGKGYHLMSFPQSAPHGVVFLHVTYVPAQEKNFTTAPAICHDGKAHFPREGVFVSNGTHWFVTQRNFYEPQIITTDNTFVSGNCDVVIGIVNNTVYDPLQPELDSFKEELDKYFKNHTSPDVDLGDISGINASVVNIQKEIDRLNEVAKNLNESLIDLQELGKYEQ

SEQ ID NO: 8 - protein, 1273 aa, Artificial Sequence
  source: /note="Description of Artificial Sequence: Synthetic polypeptide"
MFVFLVLLPLVSSQCVNLTTRTQLPPAYTNSFTRGVYYPDKVFRSSVLHSTQDLFLPFFSNVTWFHAIHVSGTNGTKRFDNPVLPFNDGVYFASTEKSNIIRGWIFGTTLDSKTQSLLIVNNATNVVIKVCEFQFCNDPFLGVYYHKNNKSWMESEFRVYSSANNCTFEYVSQPFLMDLEGKQGNFKNLREFVFKNIDGYFKIYSKHTPINLVRDLPQGFSALEPLVDLPIGINITRFQTLLALHRSYLTPGDSSSGWTAGAAAYYVGYLQPRTFLLKYNENGTITDAVDCALDPLSETKCTLKSFTVEKGIYQTSNFRVQPTESIVRFPNITNLCPFGEVFNATRFASVYAWNRKRISNCVADYSVLYNSASFSTFKCYGVSPTKLNDLCFTNVYADSFVIRGDEVRQIAPGQTGKIADYNYKLPDDFTGCVIAWNSNNLDSKVGGNYNYLYRLFRKSNLKPFERDISTEIYQAGSTPCNGVEGFNCYFPLQSYGFQPTNGVGYQPYRVVVLSFELLHAPATVCGPKKSTNLVKNKCVNFNFNGLTGTGVLTESNKKFLPFQQFGRDIADTTDAVRDPQTLEILDITPCSFGGVSVITPGTNTSNQVAVLYQDVNCTEVPVAIHADQLTPTWRVYSTGSNVFQTRAGCLIGAEHVNNSYECDIPIGAGICASYQTQTNSPRRARSVASQSIIAYTMSLGAENSVAYSNNSIAIPTNFTISVTTEILPVSMTKTSVDCTMYICGDSTECSNLLLQYGSFCTQLNRALTGIAVEQDKNTQEVFAQVKQIYKTPPIKDFGGFNFSQILPDPSKPSKRSFIEDLLFNKVTLADAGFIKQYGDCLGDIAARDLICAQKFNGLTVLPPLLTDEMIAQYTSALLAGTITSGWTFGAGAALQIPFAMQMAYRFNGIGVTQNVLYENQKLIANQFNSAIGKIQDSLSSGASALGKLQDVVNQNAQALNTLVKQLSSNFGAISSVLNDILSRLDKVEAEVQIDRLITGRLQSLQTYVTQQLIRAAEIRASANLAATKMSECVLGQSKRVDFCGKGYHLMSFPQSAPHGVVFLHVTYVPAQEKNFTTAPAICHDGKAHFPREGVFVSNGTHWFVTQRNFYEPQIITTDNTFVSGNCDVVIGIVNNTVYDPLQPELDSFKEELDKYFKNHTSPDVDLGDISGINASVVNIQKEIDRLNEVAKNLNESLIDLQELGKYEQYIKWPWYIWLGFIAGLIAIVMVTIMLCCMTSCCSCLKGCCSCGSCCKFDEDDSEPVLKGVKLHYT

SEQ ID NO: 9 - protein, 1273 aa, Artificial Sequence
  source: /note="Description of Artificial Sequence: Synthetic polypeptide"
MFVFLVLLPLVSSQCVNLTTRTQLPPAYTNSFTRGVYYPDKVFRSSVLHSTQDLFLPFFSNVTWFHAIHVSGTNGTKRFDNPVLPFNDGVYFASTEKSNIIRGWIFGTTLDSKTQSLLIVNNATNVVIKVCEFQFCNDPFLGVYYHKNNKSWMESEFRVYSSANNCTFEYVSQPFLMDLEGKQGNFKNLREFVFKNIDGYFKIYSKHTPINLVRDLPQGFSALEPLVDLPIGINITRFQTLLALHRSYLTPGDSSSGWTAGAAAYYVGYLQPRTFLLKYNENGTITDAVDCALDPLSETKCTLKSFTVEKGIYQTSNFRVQPTESIVRFPNITNLCPFGEVFNATRFASVYAWNRKRISNCVADYSVLYNSASFSTFKCYGVSPTKLNDLCFTNVYADSFVIRGDEVRQIAPGQTGKIADYNYKLPDDFTGCVIAWNSNNLDSKVGGNYNYLYRLFRKSNLKPFERDISTEIYQAGSTPCNGVEGFNCYFPLQSYGFQPTNGVGYQPYRVVVLSFELLHAPATVCGPKKSTNLVKNKCVNFNFNGLTGTGVLTESNKKFLPFQQFGRDIADTTDAVRDPQTLEILDITPCSFGGVSVITPGTNTSNQVAVLYQDVNCTEVPVAIHADQLTPTWRVYSTGSNVFQTRAGCLIGAEHVNNSYECDIPIGAGICASYQTQTNSPRRARSVASQSIIAYTMSLGAENSVAYSNNSIAIPTNFTISVTTEILPVSMTKTSVDCTMYICGDSTECSNLLLQYGSFCTQLNRALTGIAVEQDKNTQEVFAQVKQIYKTPPIKDFGGFNFSQILPDPSKPSKRSFIEDLLFNKVTLADAGFIKQYGDCLGDIAARDLICAQKFNGLTVLPPLLTDEMIAQYTSALLAGTITSGWTFGAGAALQIPFAMQMAYRFNGIGVTQNVLYENQKLIANQFNSAIGKIQDSLSSTAGALGKLQDVVNQNAQALNTLVKQLSSNFGAISSVLNDILSRLDKVEAEVQIDRLITGRLQSLQTYVTQQLIRAAEIRASANLAATKMSECVLGQSKRVDFCGKGYHLMSFPQSAPHGVVFLHVTYVPAQEKNFTTAPAICHDGKAHFPREGVFVSNGTHWFVTQRNFYEPQIITTDNTFVSGNCDVVIGIVNNTVYDPLQPELDSFKEELDKYFKNHTSPDVDLGDISGINASVVNIQKEIDRLNEVAKNLNESLIDLQELGKYEQYIKWPWYIWLGFIAGLIAIVMVTIMLCCMTSCCSCLKGCCSCGSCCKFDEDDSEPVLKGVKLHYT

SEQ ID NO: 10 - protein, 1273 aa, Artificial Sequence
  source: /note="Description of Artificial Sequence: Synthetic polypeptide"
MFVFLVLLPLVSSQCVNLTTRTQLPPAYTNSFTRGVYYPDKVFRSSVLHSTQDLFLPFFSNVTWFHAIHVSGTNGTKRFDNPVLPFNDGVYFASTEKSNIIRGWIFGTTLDSKTQSLLIVNNATNVVIKVCEFQFCNDPFLGVYYHKNNKSWMESEFRVYSSANNCTFEYVSQPFLMDLEGKQGNFKNLREFVFKNIDGYFKIYSKHTPINLVRDLPQGFSALEPLVDLPIGINITRFQTLLALHRSYLTPGDSSSGWTAGAAAYYVGYLQPRTFLLKYNENGTITDAVDCALDPLSETKCTLKSFTVEKGIYQTSNFRVQPTESIVRFPNITNLCPFGEVFNATRFASVYAWNRKRISNCVADYSVLYNSASFSTFKCYGVSPTKLNDLCFTNVYADSFVIRGDEVRQIAPGQTGKIADYNYKLPDDFTGCVIAWNSNNLDSKVGGNYNYLYRLFRKSNLKPFERDISTEIYQAGSTPCNGVEGFNCYFPLQSYGFQPTNGVGYQPYRVVVLSFELLHAPATVCGPKKSTNLVKNKCVNFNFNGLTGTGVLTESNKKFLPFQQFGRDIADTTDAVRDPQTLEILDITPCSFGGVSVITPGTNTSNQVAVLYQNVNCTEVPVAIHADQLTPTWRVYSTGSNVFQTRAGCLIGAEHVNNSYECDIPIGAGICASYQTQTNSPRRARSVASQSIIAYTMSLGAENSVAYSNNSIAIPTNFTISVTTEILPVSMTKTSVDCTMYICGDSTECSNLLLQYGSFCTQLNRALTGIAVEQDKNTQEVFAQVKQIYKTPPIKDFGGFNFSQILPDPSKPSKRSFIEDLLFNKVTLADAGFIKQYGDCLGDIAARDLICAQKFNGLTVLPPLLTDEMIAQYTSALLAGTITSGWTFGAGPALQIPFAMQMAYRFNGIGVTQNVLYENQKLIANQFNSAIGKIQDSLSSGPSALGKLQDVVNQNAQALNTLVKQLSSNFGAISSVLNDILSRLDKVEAEVQIDRLITGRLQSLQTYVTQQLIRAAEIRASANLAATKMSECVLGQSKRVDFCGKGYHLMSFPQSAPHGVVFLHVTYVPAQEKNFTTAPAICHDGKAHFPREGVFVSNGTHWFVTQRNFYEPQIITTDNTFVSGNCDVVIGIVNNTVYDPLQPELDSFKEELDKYFKNHTSPDVDLGDISGINASVVNIQKEIDRLNEVAKNLNESLIDLQELGKYEQYIKWPWYIWLGFIAGLIAIVMVTIMLCCMTSCCSCLKGCCSCGSCCKFDEDDSEPVLKGVKLHYT

SEQ ID NO: 11 - protein, 1273 aa, Artificial Sequence
  source: /note="Description of Artificial Sequence: Synthetic polypeptide"
MFVFLVLLPLVSSQCVNLTTRTQLPPAYTNSFTRGVYYPDKVFRSSVLHSTQDLFLPFFSNVTWFHAIHVSGTNGTKRFDNPVLPFNDGVYFASTEKSNIIRGWIFGTTLDSKTQSLLIVNNATNVVIKVCEFQFCNDPFLGVYYHKNNKSWMESEFRVYSSANNCTFEYVSQPFLMDLEGKQGNFKNLREFVFKNIDGYFKIYSKHTPINLVRDLPQGFSALEPLVDLPIGINITRFQTLLALHRSYLTPGDSSSGWTAGAAAYYVGYLQPRTFLLKYNENGTITDAVDCALDPLSETKCTLKSFTVEKGIYQTSNFRVQPTESIVRFPNITNLCPFGEVFNATRFASVYAWNRKRISNCVADYSVLYNSASFSTFKCYGVSPTKLNDLCFTNVYADSFVIRGDEVRQIAPGQTGKIADYNYKLPDDFTGCVIAWNSNNLDSKVGGNYNYLYRLFRKSNLKPFERDISTEIYQAGSTPCNGVEGFNCYFPLQSYGFQPTNGVGYQPYRVVVLSFELLHAPATVCGPKKSTNLVKNKCVNFNFNGLTGTGVLTESNKKFLPFQQFGRDIADTTDAVRDPQTLEILDITPCSFGGVSVITPGTNTSNQVAVLYQNVNCTEVPVAIHADQLTPTWRVYSTGSNVFQTRAGCLIGAEHVNNSYECDIPIGAGICASYQTQTNSPRRARSVASQSIIAYTMSLGAENSVAYSNNSIAIPTNFTISVTTEILPVSMTKTSVDCTMYICGDSTECSNLLLQYGSFCTQLNRALTGIAVEQDKNTQEVFAQVKQIYKTPPIKDFGGFNFSQILPDPSKPSKRSFIEDLLFNKVTLADAGFIKQYGDCLGDIAARDLICAQKFNGLTVLPPLLTDEMIAQYTSALLAGTITSGWTFGAGPALQIPFAMQMAYRFNGIGVTQNVLYENQKLIANQFNSAIGKIQDSLSSTPGALGKLQDVVNQNAQALNTLVKQLSSNFGAISSVLNDILSRLDKVEAEVQIDRLITGRLQSLQTYVTQQLIRAAEIRASANLAATKMSECVLGQSKRVDFCGKGYHLMSFPQSAPHGVVFLHVTYVPAQEKNFTTAPAICHDGKAHFPREGVFVSNGTHWFVTQRNFYEPQIITTDNTFVSGNCDVVIGIVNNTVYDPLQPELDSFKEELDKYFKNHTSPDVDLGDISGINASVVNIQKEIDRLNEVAKNLNESLIDLQELGKYEQYIKWPWYIWLGFIAGLIAIVMVTIMLCCMTSCCSCLKGCCSCGSCCKFDEDDSEPVLKGVKLHYT

SEQ ID NO: 12 - protein, 1273 aa, Artificial Sequence
  source: /note="Description of Artificial Sequence: Synthetic polypeptide"
MFVFLVLLPLVSSQCVNLTTRTQLPPAYTNSFTRGVYYPDKVFRSSVLHSTQDLFLPFFSNVTWFHAIHVSGTNGTKRFDNPVLPFNDGVYFASTEKSNIIRGWIFGTTLDSKTQSLLIVNNATNVVIKVCEFQFCNDPFLGVYYHKNNKSWMESEFRVYSSANNCTFEYVSQPFLMDLEGKQGNFKNLREFVFKNIDGYFKIYSKHTPINLVRDLPQGFSALEPLVDLPIGINITRFQTLLALHRSYLTPGDSSSGWTAGAAAYYVGYLQPRTFLLKYNENGTITDAVDCALDPLSETKCTLKSFTVEKGIYQTSNFRVQPTESIVRFPNITNLCPFGEVFNATRFASVYAWNRKRISNCVADYSVLYNSASFSTFKCYGVSPTKLNDLCFTNVYADSFVIRGDEVRQIAPGQTGKIADYNYKLPDDFTGCVIAWNSNNLDSKVGGNYNYLYRLFRKSNLKPFERDISTEIYQAGSTPCNGVEGFNCYFPLQSYGFQPTNGVGYQPYRVVVLSFELLHAPATVCGPKKSTNLVKNKCVNFNFNGLTGTGVLTESNKKFLPFQQFGRDIADTTDAVRDPQTLEILDITPCSFGGVSVITPGTNTSNQVAVLYQNVNCTEVPVAIHADQLTPTWRVYSTGSNVFQTRAGCLIGAEHVNNSYECDIPIGAGICASYQTQTNSPRRARSVASQSIIAYTMSLGAENSVAYSNNSIAIPTNFTISVTTEILPVSMTKTSVDCTMYICGDSTECSNLLLQYGSFCTQLNRALTGIAVEQDKNTQEVFAQVKQIYKTPPIKDFGGFNFSQILPDPSKPSKRSFIEDLLFNKVTLADAGFIKQYGDCLGDIAARDLICAQKFNGLTVLPPLLTDEMIAQYTSALLAGTITSGWTFGAGPALQIPFAMQMAYRFNGIGVTQNVLYENQKLIANQFNSAIGKIQDSLSSGPGALGKLQDVVNQNAQALNTLVKQLSSNFGAISSVLNDILSRLDKVEAEVQIDRLITGRLQSLQTYVTQQLIRAAEIRASANLAATKMSECVLGQSKRVDFCGKGYHLMSFPQSAPHGVVFLHVTYVPAQEKNFTTAPAICHDGKAHFPREGVFVSNGTHWFVTQRNFYEPQIITTDNTFVSGNCDVVIGIVNNTVYDPLQPELDSFKEELDKYFKNHTSPDVDLGDISGINASVVNIQKEIDRLNEVAKNLNESLIDLQELGKYEQYIKWPWYIWLGFIAGLIAIVMVTIMLCCMTSCCSCLKGCCSCGSCCKFDEDDSEPVLKGVKLHYT

SEQ ID NO: 13 - protein, 1273 aa, Artificial Sequence
  source: /note="Description of Artificial Sequence: Synthetic polypeptide"
MFVFLVLLPLVSSQCVNLTTRTQLPPAYTNSFTRGVYYPDKVFRSSVLHSTQDLFLPFFSNVTWFHAIHVSGTNGTKRFDNPVLPFNDGVYFASTEKSNIIRGWIFGTTLDSKTQSLLIVNNATNVVIKVCEFQFCNDPFLGVYYHKNNKSWMESEFRVYSSANNCTFEYVSQPFLMDLEGKQGNFKNLREFVFKNIDGYFKIYSKHTPINLVRDLPQGFSALEPLVDLPIGINITRFQTLLALHRSYLTPGDSSSGWTAGAAAYYVGYLQPRTFLLKYNENGTITDAVDCALDPLSETKCTLKSFTVEKGIYQTSNFRVQPTESIVRFPNITNLCPFGEVFNATRFASVYAWNRKRISNCVADYSVLYNSASFSTFKCYGVSPTKLNDLCFTNVYADSFVIRGDEVRQIAPGQTGKIADYNYKLPDDFTGCVIAWNSNNLDSKVGGNYNYLYRLFRKSNLKPFERDISTEIYQAGSTPCNGVEGFNCYFPLQSYGFQPTNGVGYQPYRVVVLSFELLHAPATVCGPKKSTNLVKNKCVNFNFNGLTGTGVLTESNKKFLPFQQFGRDIADTTDAVRDPQTLEILDITPCSFGGVSVITPGTNTSNQVAVLYQNVNCTEVPVAIHADQLTPTWRVYSTGSNVFQTRAGCLIGAEHVNNSYECDIPIGAGICASYQTQTNSPRRARSVASQSIIAYTMSLGAENSVAYSNNSIAIPTNFTISVTTEILPVSMTKTSVDCTMYICGDSTECSNLLLQYGSFCTQLNRALTGIAVEQDKNTQEVFAQVKQIYKTPPIKDFGGFNFSQILPDPSKPSKRSFIEDLLFNKVTLADAGFIKQYGDCLGDIAARDLICAQKFNGLTVLPPLLTDEMIAQYTSALLAGTITSGWTFGAGPALQIPFAMQMAYRFNGIGVTQNVLYENQKLIANQFNSAIGKIQDSLSSGPSPLGKLQDVVNQNAQALNTLVKQLSSNFGAISSVLNDILSRLDKVEAEVQIDRLITGRLQSLQTYVTQQLIRAAEIRASANLAATKMSECVLGQSKRVDFCGKGYHLMSFPQSAPHGVVFLHVTYVPAQEKNFTTAPAICHDGKAHFPREGVFVSNGTHWFVTQRNFYEPQIITTDNTFVSGNCDVVIGIVNNTVYDPLQPELDSFKEELDKYFKNHTSPDVDLGDISGINASVVNIQKEIDRLNEVAKNLNESLIDLQELGKYEQYIKWPWYIWLGFIAGLIAIVMVTIMLCCMTSCCSCLKGCCSCGSCCKFDEDDSEPVLKGVKLHYT

SEQ ID NO: 14 - protein, 1273 aa, Artificial Sequence
  source: /note="Description of Artificial Sequence: Synthetic polypeptide"
MFVFLVLLPLVSSQCVNLTTRTQLPPAYTNSFTRGVYYPDKVFRSSVLHSTQDLFLPFFSNVTWFHAIHVSGTNGTKRFDNPVLPFNDGVYFASTEKSNIIRGWIFGTTLDSKTQSLLIVNNATNVVIKVCEFQFCNDPFLGVYYHKNNKSWMESEFRVYSSANNCTFEYVSQPFLMDLEGKQGNFKNLREFVFKNIDGYFKIYSKHTPINLVRDLPQGFSALEPLVDLPIGINITRFQTLLALHRSYLTPGDSSSGWTAGAAAYYVGYLQPRTFLLKYNENGTITDAVDCALDPLSETKCTLKSFTVEKGIYQTSNFRVQPTESIVRFPNITNLCPFGEVFNATRFASVYAWNRKRISNCVADYSVLYNSASFSTFKCYGVSPTKLNDLCFTNVYADSFVIRGDEVRQIAPGQTGKIADYNYKLPDDFTGCVIAWNSNNLDSKVGGNYNYLYRLFRKSNLKPFERDISTEIYQAGSTPCNGVEGFNCYFPLQSYGFQPTNGVGYQPYRVVVLSFELLHAPATVCGPKKSTNLVKNKCVNFNFNGLTGTGVLTESNKKFLPFQQFGRDIADTTDAVRDPQTLEILDITPCSFGGVSVITPGTNTSNQVAVLYQNVNCTEVPVAIHADQLTPTWRVYSTGSNVFQTRAGCLIGAEHVNNSYECDIPIGAGICASYQTQTNSPRRARSVASQSIIAYTMSLGAENSVAYSNNSIAIPTNFTISVTTEILPVSMTKTSVDCTMYICGDSTECSNLLLQYGSFCTQLNRALTGIAVEQDKNTQEVFAQVKQIYKTPPIKDFGGFNFSQILPDPSKPSKRSFIEDLLFNKVTLADAGFIKQYGDCLGDIAARDLICAQKFNGLTVLPPLLTDEMIAQYTSALLAGTITSGWTFGAGPALQIPFAMQMAYRFNGIGVTQNVLYENQKLIANQFNSAIGKIQDSLSSTPGPLGKLQDVVNQNAQALNTLVKQLSSNFGAISSVLNDILSRLDKVEAEVQIDRLITGRLQSLQTYVTQQLIRAAEIRASANLAATKMSECVLGQSKRVDFCGKGYHLMSFPQSAPHGVVFLHVTYVPAQEKNFTTAPAICHDGKAHFPREGVFVSNGTHWFVTQRNFYEPQIITTDNTFVSGNCDVVIGIVNNTVYDPLQPELDSFKEELDKYFKNHTSPDVDLGDISGINASVVNIQKEIDRLNEVAKNLNESLIDLQELGKYEQYIKWPWYIWLGFIAGLIAIVMVTIMLCCMTSCCSCLKGCCSCGSCCKFDEDDSEPVLKGVKLHYT

SEQ ID NO: 15 - protein, 1273 aa, Artificial Sequence
  source: /note="Description of Artificial Sequence: Synthetic polypeptide"
MFVFLVLLPLVSSQCVNLTTRTQLPPAYTNSFTRGVYYPDKVFRSSVLHSTQDLFLPFFSNVTWFHAIHVSGTNGTKRFDNPVLPFNDGVYFASTEKSNIIRGWIFGTTLDSKTQSLLIVNNATNVVIKVCEFQFCNDPFLGVYYHKNNKSWMESEFRVYSSANNCTFEYVSQPFLMDLEGKQGNFKNLREFVFKNIDGYFKIYSKHTPINLVRDLPQGFSALEPLVDLPIGINITRFQTLLALHRSYLTPGDSSSGWTAGAAAYYVGYLQPRTFLLKYNENGTITDAVDCALDPLSETKCTLKSFTVEKGIYQTSNFRVQPTESIVRFPNITNLCPFGEVFNATRFASVYAWNRKRISNCVADYSVLYNSASFSTFKCYGVSPTKLNDLCFTNVYADSFVIRGDEVRQIAPGQTGKIADYNYKLPDDFTGCVIAWNSNNLDSKVGGNYNYLYRLFRKSNLKPFERDISTEIYQAGSTPCNGVEGFNCYFPLQSYGFQPTNGVGYQPYRVVVLSFELLHAPATVCGPKKSTNLVKNKCVNFNFNGLTGTGVLTESNKKFLPFQQFGRDIADTTDAVRDPQTLEILDITPCSFGGVSVITPGTNTSNQVAVLYQDVNCTEVPVAIHADQLTPTWRVYSTGSNVFQTRAGCLIGAEHVNNSYECDIPIGAGICASYQTQTNSPRRARSVASQSIIAYTMSLGAENSVAYSNNSIAIPTNFTISVTTEILPVSMTKTSVDCTMYICGDSTECSNLLLQYGSFCTQLNRALTGIAVEQDKNTQEVFAQVKQIYKTPPIKDFGGFNFSQILPDPSKPSKRSFIEDLLFNKVTLADAGFIKQYGDCLGDIAARDLICAQKFNGLTVLPPLLTDEMIAQYTSALLAGTITSGWTFGAGAALQIPFAMQMAYRFNGIGVTQNVLYENQKLIANQFNSAIGKIQDSLSSGASALGKLQDVVNQNAQALNTLVKQLSSNFGAISSVLNDILSRLDPVEAEVQIDRLITGRLQSLQTYVTQQLIRAAEIRASANLAATKMSECVLGQSKRVDFCGKGYHLMSFPQSAPHGVVFLHVTYVPAQEKNFTTAPAICHDGKAHFPREGVFVSNGTHWFVTQRNFYEPQIITTDNTFVSGNCDVVIGIVNNTVYDPLQPELDSFKEELDKYFKNHTSPDVDLGDISGINASVVNIQKEIDRLNEVAKNLNESLIDLQELGKYEQYIKWPWYIWLGFIAGLIAIVMVTIMLCCMTSCCSCLKGCCSCGSCCKFDEDDSEPVLKGVKLHYT

SEQ ID NO: 16 - protein, 1273 aa, Artificial Sequence
  source: /note="Description of Artificial Sequence: Synthetic polypeptide"
MFVFLVLLPLVSSQCVNLTTRTQLPPAYTNSFTRGVYYPDKVFRSSVLHSTQDLFLPFFSNVTWFHAIHVSGTNGTKRFDNPVLPFNDGVYFASTEKSNIIRGWIFGTTLDSKTQSLLIVNNATNVVIKVCEFQFCNDPFLGVYYHKNNKSWMESEFRVYSSANNCTFEYVSQPFLMDLEGKQGNFKNLREFVFKNIDGYFKIYSKHTPINLVRDLPQGFSALEPLVDLPIGINITRFQTLLALHRSYLTPGDSSSGWTAGAAAYYVGYLQPRTFLLKYNENGTITDAVDCALDPLSETKCTLKSFTVEKGIYQTSNFRVQPTESIVRFPNITNLCPFGEVFNATRFASVYAWNRKRISNCVADYSVLYNSASFSTFKCYGVSPTKLNDLCFTNVYADSFVIRGDEVRQIAPGQTGKIADYNYKLPDDFTGCVIAWNSNNLDSKVGGNYNYLYRLFRKSNLKPFERDISTEIYQAGSTPCNGVEGFNCYFPLQSYGFQPTNGVGYQPYRVVVLSFELLHAPATVCGPKKSTNLVKNKCVNFNFNGLTGTGVLTESNKKFLPFQQFGRDIADTTDAVRDPQTLEILDITPCSFGGVSVITPGTNTSNQVAVLYQDVNCTEVPVAIHADQLTPTWRVYSTGSNVFQTRAGCLIGAEHVNNSYECDIPIGAGICASYQTQTNSPRRARSVASQSIIAYTMSLGAENSVAYSNNSIAIPTNFTISVTTEILPVSMTKTSVDCTMYICGDSTECSNLLLQYGSFCTQLNRALTGIAVEQDKNTQEVFAQVKQIYKTPPIKDFGGFNFSQILPDPSKPSKRSFIEDLLFNKVTLADAGFIKQYGDCLGDIAARDLICAQKFNGLTVLPPLLTDEMIAQYTSALLAGTITSGWTFGAGAALQIPFAMQMAYRFNGIGVTQNVLYENQKLIANQFNSAIGKIQDSLSSTAGALGKLQDVVNQNAQALNTLVKQLSSNFGAISSVLNDILSRLDPVEAEVQIDRLITGRLQSLQTYVTQQLIRAAEIRASANLAATKMSECVLGQSKRVDFCGKGYHLMSFPQSAPHGVVFLHVTYVPAQEKNFTTAPAICHDGKAHFPREGVFVSNGTHWFVTQRNFYEPQIITTDNTFVSGNCDVVIGIVNNTVYDPLQPELDSFKEELDKYFKNHTSPDVDLGDISGINASVVNIQKEIDRLNEVAKNLNESLIDLQELGKYEQYIKWPWYIWLGFIAGLIAIVMVTIMLCCMTSCCSCLKGCCSCGSCCKFDEDDSEPVLKGVKLHYT

SEQ ID NO: 17 - protein, 1273 aa, Artificial Sequence
  source: /note="Description of Artificial Sequence: Synthetic polypeptide"
MFVFLVLLPLVSSQCVNLTTRTQLPPAYTNSFTRGVYYPDKVFRSSVLHSTQDLFLPFFSNVTWFHAIHVSGTNGTKRFDNPVLPFNDGVYFASTEKSNIIRGWIFGTTLDSKTQSLLIVNNATNVVIKVCEFQFCNDPFLGVYYHKNNKSWMESEFRVYSSANNCTFEYVSQPFLMDLEGKQGNFKNLREFVFKNIDGYFKIYSKHTPINLVRDLPQGFSALEPLVDLPIGINITRFQTLLALHRSYLTPGDSSSGWTAGAAAYYVGYLQPRTFLLKYNENGTITDAVDCALDPLSETKCTLKSFTVEKGIYQTSNFRVQPTESIVRFPNITNLCPFGEVFNATRFASVYAWNRKRISNCVADYSVLYNSASFSTFKCYGVSPTKLNDLCFTNVYADSFVIRGDEVRQIAPGQTGKIADYNYKLPDDFTGCVIAWNSNNLDSKVGGNYNYLYRLFRKSNLKPFERDISTEIYQAGSTPCNGVEGFNCYFPLQSYGFQPTNGVGYQPYRVVVLSFELLHAPATVCGPKKSTNLVKNKCVNFNFNGLTGTGVLTESNKKFLPFQQFGRDIADTTDAVRDPQTLEILDITPCSFGGVSVITPGTNTSNQVAVLYQNVNCTEVPVAIHADQLTPTWRVYSTGSNVFQTRAGCLIGAEHVNNSYECDIPIGAGICASYQTQTNSPRRARSVASQSIIAYTMSLGAENSVAYSNNSIAIPTNFTISVTTEILPVSMTKTSVDCTMYICGDSTECSNLLLQYGSFCTQLNRALTGIAVEQDKNTQEVFAQVKQIYKTPPIKDFGGFNFSQILPDPSKPSKRSFIEDLLFNKVTLADAGFIKQYGDCLGDIAARDLICAQKFNGLTVLPPLLTDEMIAQYTSALLAGTITSGWTFGAGPALQIPFAMQMAYRFNGIGVTQNVLYENQKLIANQFNSAIGKIQDSLSSGPSALGKLQDVVNQNAQALNTLVKQLSSNFGAISSVLNDILSRLDPVEAEVQIDRLITGRLQSLQTYVTQQLIRAAEIRASANLAATKMSECVLGQSKRVDFCGKGYHLMSFPQSAPHGVVFLHVTYVPAQEKNFTTAPAICHDGKAHFPREGVFVSNGTHWFVTQRNFYEPQIITTDNTFVSGNCDVVIGIVNNTVYDPLQPELDSFKEELDKYFKNHTSPDVDLGDISGINASVVNIQKEIDRLNEVAKNLNESLIDLQELGKYEQYIKWPWYIWLGFIAGLIAIVMVTIMLCCMTSCCSCLKGCCSCGSCCKFDEDDSEPVLKGVKLHYT

SEQ ID NO: 18 - protein, 1273 aa, Artificial Sequence
  source: /note="Description of Artificial Sequence: Synthetic polypeptide"
MFVFLVLLPLVSSQCVNLTTRTQLPPAYTNSFTRGVYYPDKVFRSSVLHSTQDLFLPFFSNVTWFHAIHVSGTNGTKRFDNPVLPFNDGVYFASTEKSNIIRGWIFGTTLDSKTQSLLIVNNATNVVIKVCEFQFCNDPFLGVYYHKNNKSWMESEFRVYSSANNCTFEYVSQPFLMDLEGKQGNFKNLREFVFKNIDGYFKIYSKHTPINLVRDLPQGFSALEPLVDLPIGINITRFQTLLALHRSYLTPGDSSSGWTAGAAAYYVGYLQPRTFLLKYNENGTITDAVDCALDPLSETKCTLKSFTVEKGIYQTSNFRVQPTESIVRFPNITNLCPFGEVFNATRFASVYAWNRKRISNCVADYSVLYNSASFSTFKCYGVSPTKLNDLCFTNVYADSFVIRGDEVRQIAPGQTGKIADYNYKLPDDFTGCVIAWNSNNLDSKVGGNYNYLYRLFRKSNLKPFERDISTEIYQAGSTPCNGVEGFNCYFPLQSYGFQPTNGVGYQPYRVVVLSFELLHAPATVCGPKKSTNLVKNKCVNFNFNGLTGTGVLTESNKKFLPFQQFGRDIADTTDAVRDPQTLEILDITPCSFGGVSVITPGTNTSNQVAVLYQNVNCTEVPVAIHADQLTPTWRVYSTGSNVFQTRAGCLIGAEHVNNSYECDIPIGAGICASYQTQTNSPRRARSVASQSIIAYTMSLGAENSVAYSNNSIAIPTNFTISVTTEILPVSMTKTSVDCTMYICGDSTECSNLLLQYGSFCTQLNRALTGIAVEQDKNTQEVFAQVKQIYKTPPIKDFGGFNFSQILPDPSKPSKRSFIEDLLFNKVTLADAGFIKQYGDCLGDIAARDLICAQKFNGLTVLPPLLTDEMIAQYTSALLAGTITSGWTFGAGPALQIPFAMQMAYRFNGIGVTQNVLYENQKLIANQFNSAIGKIQDSLSSTPGALGKLQDVVNQNAQALNTLVKQLSSNFGAISSVLNDILSRLDPVEAEVQIDRLITGRLQSLQTYVTQQLIRAAEIRASANLAATKMSECVLGQSKRVDFCGKGYHLMSFPQSAPHGVVFLHVTYVPAQEKNFTTAPAICHDGKAHFPREGVFVSNGTHWFVTQRNFYEPQIITTDNTFVSGNCDVVIGIVNNTVYDPLQPELDSFKEELDKYFKNHTSPDVDLGDISGINASVVNIQKEIDRLNEVAKNLNESLIDLQELGKYEQYIKWPWYIWLGFIAGLIAIVMVTIMLCCMTSCCSCLKGCCSCGSCCKFDEDDSEPVLKGVKLHYT

SEQ ID NO: 19 - protein, 1273 aa, Artificial Sequence
  source: /note="Description of Artificial Sequence: Synthetic polypeptide"
MFVFLVLLPLVSSQCVNLTTRTQLPPAYTNSFTRGVYYPDKVFRSSVLHSTQDLFLPFFSNVTWFHAIHVSGTNGTKRFDNPVLPFNDGVYFASTEKSNIIRGWIFGTTLDSKTQSLLIVNNATNVVIKVCEFQFCNDPFLGVYYHKNNKSWMESEFRVYSSANNCTFEYVSQPFLMDLEGKQGNFKNLREFVFKNIDGYFKIYSKHTPINLVRDLPQGFSALEPLVDLPIGINITRFQTLLALHRSYLTPGDSSSGWTAGAAAYYVGYLQPRTFLLKYNENGTITDAVDCALDPLSETKCTLKSFTVEKGIYQTSNFRVQPTESIVRFPNITNLCPFGEVFNATRFASVYAWNRKRISNCVADYSVLYNSASFSTFKCYGVSPTKLNDLCFTNVYADSFVIRGDEVRQIAPGQTGKIADYNYKLPDDFTGCVIAWNSNNLDSKVGGNYNYLYRLFRKSNLKPFERDISTEIYQAGSTPCNGVEGFNCYFPLQSYGFQPTNGVGYQPYRVVVLSFELLHAPATVCGPKKSTNLVKNKCVNFNFNGLTGTGVLTESNKKFLPFQQFGRDIADTTDAVRDPQTLEILDITPCSFGGVSVITPGTNTSNQVAVLYQNVNCTEVPVAIHADQLTPTWRVYSTGSNVFQTRAGCLIGAEHVNNSYECDIPIGAGICASYQTQTNSPRRARSVASQSIIAYTMSLGAENSVAYSNNSIAIPTNFTISVTTEILPVSMTKTSVDCTMYICGDSTECSNLLLQYGSFCTQLNRALTGIAVEQDKNTQEVFAQVKQIYKTPPIKDFGGFNFSQILPDPSKPSKRSFIEDLLFNKVTLADAGFIKQYGDCLGDIAARDLICAQKFNGLTVLPPLLTDEMIAQYTSALLAGTITSGWTFGAGPALQIPFAMQMAYRFNGIGVTQNVLYENQKLIANQFNSAIGKIQDSLSSGPGALGKLQDVVNQNAQALNTLVKQLSSNFGAISSVLNDILSRLDPVEAEVQIDRLITGRLQSLQTYVTQQLIRAAEIRASANLAATKMSECVLGQSKRVDFCGKGYHLMSFPQSAPHGVVFLHVTYVPAQEKNFTTAPAICHDGKAHFPREGVFVSNGTHWFVTQRNFYEPQIITTDNTFVSGNCDVVIGIVNNTVYDPLQPELDSFKEELDKYFKNHTSPDVDLGDISGINASVVNIQKEIDRLNEVAKNLNESLIDLQELGKYEQYIKWPWYIWLGFIAGLIAIVMVTIMLCCMTSCCSCLKGCCSCGSCCKFDEDDSEPVLKGVKLHYT

SEQ ID NO: 20 - protein, 1273 aa, Artificial Sequence
  source: /note="Description of Artificial Sequence: Synthetic polypeptide"
MFVFLVLLPLVSSQCVNLTTRTQLPPAYTNSFTRGVYYPDKVFRSSVLHSTQDLFLPFFSNVTWFHAIHVSGTNGTKRFDNPVLPFNDGVYFASTEKSNIIRGWIFGTTLDSKTQSLLIVNNATNVVIKVCEFQFCNDPFLGVYYHKNNKSWMESEFRVYSSANNCTFEYVSQPFLMDLEGKQGNFKNLREFVFKNIDGYFKIYSKHTPINLVRDLPQGFSALEPLVDLPIGINITRFQTLLALHRSYLTPGDSSSGWTAGAAAYYVGYLQPRTFLLKYNENGTITDAVDCALDPLSETKCTLKSFTVEKGIYQTSNFRVQPTESIVRFPNITNLCPFGEVFNATRFASVYAWNRKRISNCVADYSVLYNSASFSTFKCYGVSPTKLNDLCFTNVYADSFVIRGDEVRQIAPGQTGKIADYNYKLPDDFTGCVIAWNSNNLDSKVGGNYNYLYRLFRKSNLKPFERDISTEIYQAGSTPCNGVEGFNCYFPLQSYGFQPTNGVGYQPYRVVVLSFELLHAPATVCGPKKSTNLVKNKCVNFNFNGLTGTGVLTESNKKFLPFQQFGRDIADTTDAVRDPQTLEILDITPCSFGGVSVITPGTNTSNQVAVLYQNVNCTEVPVAIHADQLTPTWRVYSTGSNVFQTRAGCLIGAEHVNNSYECDIPIGAGICASYQTQTNSPRRARSVASQSIIAYTMSLGAENSVAYSNNSIAIPTNFTISVTTEILPVSMTKTSVDCTMYICGDSTECSNLLLQYGSFCTQLNRALTGIAVEQDKNTQEVFAQVKQIYKTPPIKDFGGFNFSQILPDPSKPSKRSFIEDLLFNKVTLADAGFIKQYGDCLGDIAARDLICAQKFNGLTVLPPLLTDEMIAQYTSALLAGTITSGWTFGAGPALQIPFAMQMAYRFNGIGVTQNVLYENQKLIANQFNSAIGKIQDSLSSGPSPLGKLQDVVNQNAQALNTLVKQLSSNFGAISSVLNDILSRLDPVEAEVQIDRLITGRLQSLQTYVTQQLIRAAEIRASANLAATKMSECVLGQSKRVDFCGKGYHLMSFPQSAPHGVVFLHVTYVPAQEKNFTTAPAICHDGKAHFPREGVFVSNGTHWFVTQRNFYEPQIITTDNTFVSGNCDVVIGIVNNTVYDPLQPELDSFKEELDKYFKNHTSPDVDLGDISGINASVVNIQKEIDRLNEVAKNLNESLIDLQELGKYEQYIKWPWYIWLGFIAGLIAIVMVTIMLCCMTSCCSCLKGCCSCGSCCKFDEDDSEPVLKGVKLHYT

SEQ ID NO: 21 - protein, 1273 aa, Artificial Sequence
  source: /note="Description of Artificial Sequence: Synthetic polypeptide"
MFVFLVLLPLVSSQCVNLTTRTQLPPAYTNSFTRGVYYPDKVFRSSVLHSTQDLFLPFFSNVTWFHAIHVSGTNGTKRFDNPVLPFNDGVYFASTEKSNIIRGWIFGTTLDSKTQSLLIVNNATNVVIKVCEFQFCNDPFLGVYYHKNNKSWMESEFRVYSSANNCTFEYVSQPFLMDLEGKQGNFKNLREFVFKNIDGYFKIYSKHTPINLVRDLPQGFSALEPLVDLPIGINITRFQTLLALHRSYLTPGDSSSGWTAGAAAYYVGYLQPRTFLLKYNENGTITDAVDCALDPLSETKCTLKSFTVEKGIYQTSNFRVQPTESIVRFPNITNLCPFGEVFNATRFASVYAWNRKRISNCVADYSVLYNSASFSTFKCYGVSPTKLNDLCFTNVYADSFVIRGDEVRQIAPGQTGKIADYNYKLPDDFTGCVIAWNSNNLDSKVGGNYNYLYRLFRKSNLKPFERDISTEIYQAGSTPCNGVEGFNCYFPLQSYGFQPTNGVGYQPYRVVVLSFELLHAPATVCGPKKSTNLVKNKCVNFNFNGLTGTGVLTESNKKFLPFQQFGRDIADTTDAVRDPQTLEILDITPCSFGGVSVITPGTNTSNQVAVLYQNVNCTEVPVAIHADQLTPTWRVYSTGSNVFQTRAGCLIGAEHVNNSYECDIPIGAGICASYQTQTNSPRRARSVASQSIIAYTMSLGAENSVAYSNNSIAIPTNFTISVTTEILPVSMTKTSVDCTMYICGDSTECSNLLLQYGSFCTQLNRALTGIAVEQDKNTQEVFAQVKQIYKTPPIKDFGGFNFSQILPDPSKPSKRSFIEDLLFNKVTLADAGFIKQYGDCLGDIAARDLICAQKFNGLTVLPPLLTDEMIAQYTSALLAGTITSGWTFGAGPALQIPFAMQMAYRFNGIGVTQNVLYENQKLIANQFNSAIGKIQDSLSSTPGPLGKLQDVVNQNAQALNTLVKQLSSNFGAISSVLNDILSRLDPVEAEVQIDRLITGRLQSLQTYVTQQLIRAAEIRASANLAATKMSECVLGQSKRVDFCGKGYHLMSFPQSAPHGVVFLHVTYVPAQEKNFTTAPAICHDGKAHFPREGVFVSNGTHWFVTQRNFYEPQIITTDNTFVSGNCDVVIGIVNNTVYDPLQPELDSFKEELDKYFKNHTSPDVDLGDISGINASVVNIQKEIDRLNEVAKNLNESLIDLQELGKYEQYIKWPWYIWLGFIAGLIAIVMVTIMLCCMTSCCSCLKGCCSCGSCCKFDEDDSEPVLKGVKLHYT

SEQ ID NO: 22 - protein, 1273 aa, Artificial Sequence
  source: /note="Description of Artificial Sequence: Synthetic polypeptide"
MFVFLVLLPLVSSQCVNLTTRTQLPPAYTNSFTRGVYYPDKVFRSSVLHSTQDLFLPFFSNVTWFHAIHVSGTNGTKRFDNPVLPFNDGVYFASTEKSNIIRGWIFGTTLDSKTQSLLIVNNATNVVIKVCEFQFCNDPFLGVYYHKNNKSWMESEFRVYSSANNCTFEYVSQPFLMDLEGKQGNFKNLREFVFKNIDGYFKIYSKHTPINLVRDLPQGFSALEPLVDLPIGINITRFQTLLALHRSYLTPGDSSSGWTAGAAAYYVGYLQPRTFLLKYNENGTITDAVDCALDPLSETKCTLKSFTVEKGIYQTSNFRVQPTESIVRFPNITNLCPFGEVFNATRFASVYAWNRKRISNCVADYSVLYNSASFSTFKCYGVSPTKLNDLCFTNVYADSFVIRGDEVRQIAPGQTGKIADYNYKLPDDFTGCVIAWNSNNLDSKVGGNYNYLYRLFRKSNLKPFERDISTEIYQAGSTPCNGVEGFNCYFPLQSYGFQPTNGVGYQPYRVVVLSFELLHAPATVCGPKKSTNLVKNKCVNFNFNGLTGTGVLTESNKKFLPFQQFGRDIADTTDAVRDPQTLEILDITPCSFGGVSVITPGTNTSNQVAVLYQDVNCTEVPVAIHADQLTPTWRVYSTGSNVFQTRAGCLIGAEHVNNSYECDIPIGAGICASYQTQTNSPRRARSVASQSIIAYTMSLGAENSVAYSNNSIAIPTNFTISVTTEILPVSMTKTSVDCTMYICGDSTECSNLLLQYGSFCTQLNRALTGIAVEQDKNTQEVFAQVKQIYKTPPIKDFGGFNFSQILPDPSKPSKRSFIEDLLFNKVTLADAGFIKQYGDCLGDIAARDLICAQKFNGLTVLPPLLTDEMIAQYTSALLAGTITSGWTFGAGAALQIPFAMQMAYRFNGIGVTQNVLYENQKLIANQFNSAIGKIQDSLSSGASALGKLQDVVNQNAQALNTLVKQLSSNFGAISSVLNDILSRLDKPEAEVQIDRLITGRLQSLQTYVTQQLIRAAEIRASANLAATKMSECVLGQSKRVDFCGKGYHLMSFPQSAPHGVVFLHVTYVPAQEKNFTTAPAICHDGKAHFPREGVFVSNGTHWFVTQRNFYEPQIITTDNTFVSGNCDVVIGIVNNTVYDPLQPELDSFKEELDKYFKNHTSPDVDLGDISGINASVVNIQKEIDRLNEVAKNLNESLIDLQELGKYEQYIKWPWYIWLGFIAGLIAIVMVTIMLCCMTSCCSCLKGCCSCGSCCKFDEDDSEPVLKGVKLHYT

SEQ ID NO: 23 - protein, 1273 aa, Artificial Sequence
  source: /note="Description of Artificial Sequence: Synthetic polypeptide"
MFVFLVLLPLVSSQCVNLTTRTQLPPAYTNSFTRGVYYPDKVFRSSVLHSTQDLFLPFFSNVTWFHAIHVSGTNGTKRFDNPVLPFNDGVYFASTEKSNIIRGWIFGTTLDSKTQSLLIVNNATNVVIKVCEFQFCNDPFLGVYYHKNNKSWMESEFRVYSSANNCTFEYVSQPFLMDLEGKQGNFKNLREFVFKNIDGYFKIYSKHTPINLVRDLPQGFSALEPLVDLPIGINITRFQTLLALHRSYLTPGDSSSGWTAGAAAYYVGYLQPRTFLLKYNENGTITDAVDCALDPLSETKCTLKSFTVEKGIYQTSNFRVQPTESIVRFPNITNLCPFGEVFNATRFASVYAWNRKRISNCVADYSVLYNSASFSTFKCYGVSPTKLNDLCFTNVYADSFVIRGDEVRQIAPGQTGKIADYNYKLPDDFTGCVIAWNSNNLDSKVGGNYNYLYRLFRKSNLKPFERDISTEIYQAGSTPCNGVEGFNCYFPLQSYGFQPTNGVGYQPYRVVVLSFELLHAPATVCGPKKSTNLVKNKCVNFNFNGLTGTGVLTESNKKFLPFQQFGRDIADTTDAVRDPQTLEILDITPCSFGGVSVITPGTNTSNQVAVLYQDVNCTEVPVAIHADQLTPTWRVYSTGSNVFQTRAGCLIGAEHVNNSYECDIPIGAGICASYQTQTNSPRRARSVASQSIIAYTMSLGAENSVAYSNNSIAIPTNFTISVTTEILPVSMTKTSVDCTMYICGDSTECSNLLLQYGSFCTQLNRALTGIAVEQDKNTQEVFAQVKQIYKTPPIKDFGGFNFSQILPDPSKPSKRSFIEDLLFNKVTLADAGFIKQYGDCLGDIAARDLICAQKFNGLTVLPPLLTDEMIAQYTSALLAGTITSGWTFGAGAALQIPFAMQMAYRFNGIGVTQNVLYENQKLIANQFNSAIGKIQDSLSSTAGALGKLQDVVNQNAQALNTLVKQLSSNFGAISSVLNDILSRLDKPEAEVQIDRLITGRLQSLQTYVTQQLIRAAEIRASANLAATKMSECVLGQSKRVDFCGKGYHLMSFPQSAPHGVVFLHVTYVPAQEKNFTTAPAICHDGKAHFPREGVFVSNGTHWFVTQRNFYEPQIITTDNTFVSGNCDVVIGIVNNTVYDPLQPELDSFKEELDKYFKNHTSPDVDLGDISGINASVVNIQKEIDRLNEVAKNLNESLIDLQELGKYEQYIKWPWYIWLGFIAGLIAIVMVTIMLCCMTSCCSCLKGCCSCGSCCKFDEDDSEPVLKGVKLHYT

SEQ ID NO: 24 - protein, 1273 aa, Artificial Sequence
  source: /note="Description of Artificial Sequence: Synthetic polypeptide"
MFVFLVLLPLVSSQCVNLTTRTQLPPAYTNSFTRGVYYPDKVFRSSVLHSTQDLFLPFFSNVTWFHAIHVSGTNGTKRFDNPVLPFNDGVYFASTEKSNIIRGWIFGTTLDSKTQSLLIVNNATNVVIKVCEFQFCNDPFLGVYYHKNNKSWMESEFRVYSSANNCTFEYVSQPFLMDLEGKQGNFKNLREFVFKNIDGYFKIYSKHTPINLVRDLPQGFSALEPLVDLPIGINITRFQTLLALHRSYLTPGDSSSGWTAGAAAYYVGYLQPRTFLLKYNENGTITDAVDCALDPLSETKCTLKSFTVEKGIYQTSNFRVQPTESIVRFPNITNLCPFGEVFNATRFASVYAWNRKRISNCVADYSVLYNSASFSTFKCYGVSPTKLNDLCFTNVYADSFVIRGDEVRQIAPGQTGKIADYNYKLPDDFTGCVIAWNSNNLDSKVGGNYNYLYRLFRKSNLKPFERDISTEIYQAGSTPCNGVEGFNCYFPLQSYGFQPTNGVGYQPYRVVVLSFELLHAPATVCGPKKSTNLVKNKCVNFNFNGLTGTGVLTESNKKFLPFQQFGRDIADTTDAVRDPQTLEILDITPCSFGGVSVITPGTNTSNQVAVLYQNVNCTEVPVAIHADQLTPTWRVYSTGSNVFQTRAGCLIGAEHVNNSYECDIPIGAGICASYQTQTNSPRRARSVASQSIIAYTMSLGAENSVAYSNNSIAIPTNFTISVTTEILPVSMTKTSVDCTMYICGDSTECSNLLLQYGSFCTQLNRALTGIAVEQDKNTQEVFAQVKQIYKTPPIKDFGGFNFSQILPDPSKPSKRSFIEDLLFNKVTLADAGFIKQYGDCLGDIAARDLICAQKFNGLTVLPPLLTDEMIAQYTSALLAGTITSGWTFGAGPALQIPFAMQMAYRFNGIGVTQNVLYENQKLIANQFNSAIGKIQDSLSSGPSALGKLQDVVNQNAQALNTLVKQLSSNFGAISSVLNDILSRLDKPEAEVQIDRLITGRLQSLQTYVTQQLIRAAEIRASANLAATKMSECVLGQSKRVDFCGKGYHLMSFPQSAPHGVVFLHVTYVPAQEKNFTTAPAICHDGKAHFPREGVFVSNGTHWFVTQRNFYEPQIITTDNTFVSGNCDVVIGIVNNTVYDPLQPELDSFKEELDKYFKNHTSPDVDLGDISGINASVVNIQKEIDRLNEVAKNLNESLIDLQELGKYEQYIKWPWYIWLGFIAGLIAIVMVTIMLCCMTSCCSCLKGCCSCGSCCKFDEDDSEPVLKGVKLHYT

SEQ ID NO: 25 - protein, 1273 aa, Artificial Sequence
  source: /note="Description of Artificial Sequence: Synthetic polypeptide"
MFVFLVLLPLVSSQCVNLTTRTQLPPAYTNSFTRGVYYPDKVFRSSVLHSTQDLFLPFFSNVTWFHAIHVSGTNGTKRFDNPVLPFNDGVYFASTEKSNIIRGWIFGTTLDSKTQSLLIVNNATNVVIKVCEFQFCNDPFLGVYYHKNNKSWMESEFRVYSSANNCTFEYVSQPFLMDLEGKQGNFKNLREFVFKNIDGYFKIYSKHTPINLVRDLPQGFSALEPLVDLPIGINITRFQTLLALHRSYLTPGDSSSGWTAGAAAYYVGYLQPRTFLLKYNENGTITDAVDCALDPLSETKCTLKSFTVEKGIYQTSNFRVQPTESIVRFPNITNLCPFGEVFNATRFASVYAWNRKRISNCVADYSVLYNSASFSTFKCYGVSPTKLNDLCFTNVYADSFVIRGDEVRQIAPGQTGKIADYNYKLPDDFTGCVIAWNSNNLDSKVGGNYNYLYRLFRKSNLKPFERDISTEIYQAGSTPCNGVEGFNCYFPLQSYGFQPTNGVGYQPYRVVVLSFELLHAPATVCGPKKSTNLVKNKCVNFNFNGLTGTGVLTESNKKFLPFQQFGRDIADTTDAVRDPQTLEILDITPCSFGGVSVITPGTNTSNQVAVLYQNVNCTEVPVAIHADQLTPTWRVYSTGSNVFQTRAGCLIGAEHVNNSYECDIPIGAGICASYQTQTNSPRRARSVASQSIIAYTMSLGAENSVAYSNNSIAIPTNFTISVTTEILPVSMTKTSVDCTMYICGDSTECSNLLLQYGSFCTQLNRALTGIAVEQDKNTQEVFAQVKQIYKTPPIKDFGGFNFSQILPDPSKPSKRSFIEDLLFNKVTLADAGFIKQYGDCLGDIAARDLICAQKFNGLTVLPPLLTDEMIAQYTSALLAGTITSGWTFGAGPALQIPFAMQMAYRFNGIGVTQNVLYENQKLIANQFNSAIGKIQDSLSSTPGALGKLQDVVNQNAQALNTLVKQLSSNFGAISSVLNDILSRLDKPEAEVQIDRLITGRLQSLQTYVTQQLIRAAEIRASANLAATKMSECVLGQSKRVDFCGKGYHLMSFPQSAPHGVVFLHVTYVPAQEKNFTTAPAICHDGKAHFPREGVFVSNGTHWFVTQRNFYEPQIITTDNTFVSGNCDVVIGIVNNTVYDPLQPELDSFKEELDKYFKNHTSPDVDLGDISGINASVVNIQKEIDRLNEVAKNLNESLIDLQELGKYEQYIKWPWYIWLGFIAGLIAIVMVTIMLCCMTSCCSCLKGCCSCGSCCKFDEDDSEPVLKGVKLHYT

SEQ ID NO: 26 - protein, 1273 aa, Artificial Sequence
  source: /note="Description of Artificial Sequence: Synthetic polypeptide"
MFVFLVLLPLVSSQCVNLTTRTQLPPAYTNSFTRGVYYPDKVFRSSVLHSTQDLFLPFFSNVTWFHAIHVSGTNGTKRFDNPVLPFNDGVYFASTEKSNIIRGWIFGTTLDSKTQSLLIVNNATNVVIKVCEFQFCNDPFLGVYYHKNNKSWMESEFRVYSSANNCTFEYVSQPFLMDLEGKQGNFKNLREFVFKNIDGYFKIYSKHTPINLVRDLPQGFSALEPLVDLPIGINITRFQTLLALHRSYLTPGDSSSGWTAGAAAYYVGYLQPRTFLLKYNENGTITDAVDCALDPLSETKCTLKSFTVEKGIYQTSNFRVQPTESIVRFPNITNLCPFGEVFNATRFASVYAWNRKRISNCVADYSVLYNSASFSTFKCYGVSPTKLNDLCFTNVYADSFVIRGDEVRQIAPGQTGKIADYNYKLPDDFTGCVIAWNSNNLDSKVGGNYNYLYRLFRKSNLKPFERDISTEIYQAGSTPCNGVEGFNCYFPLQSYGFQPTNGVGYQPYRVVVLSFELLHAPATVCGPKKSTNLVKNKCVNFNFNGLTGTGVLTESNKKFLPFQQFGRDIADTTDAVRDPQTLEILDITPCSFGGVSVITPGTNTSNQVAVLYQNVNCTEVPVAIHADQLTPTWRVYSTGSNVFQTRAGCLIGAEHVNNSYECDIPIGAGICASYQTQTNSPRRARSVASQSIIAYTMSLGAENSVAYSNNSIAIPTNFTISVTTEILPVSMTKTSVDCTMYICGDSTECSNLLLQYGSFCTQLNRALTGIAVEQDKNTQEVFAQVKQIYKTPPIKDFGGFNFSQILPDPSKPSKRSFIEDLLFNKVTLADAGFIKQYGDCLGDIAARDLICAQKFNGLTVLPPLLTDEMIAQYTSALLAGTITSGWTFGAGPALQIPFAMQMAYRFNGIGVTQNVLYENQKLIANQFNSAIGKIQDSLSSGPGALGKLQDVVNQNAQALNTLVKQLSSNFGAISSVLNDILSRLDKPEAEVQIDRLITGRLQSLQTYVTQQLIRAAEIRASANLAATKMSECVLGQSKRVDFCGKGYHLMSFPQSAPHGVVFLHVTYVPAQEKNFTTAPAICHDGKAHFPREGVFVSNGTHWFVTQRNFYEPQIITTDNTFVSGNCDVVIGIVNNTVYDPLQPELDSFKEELDKYFKNHTSPDVDLGDISGINASVVNIQKEIDRLNEVAKNLNESLIDLQELGKYEQYIKWPWYIWLGFIAGLIAIVMVTIMLCCMTSCCSCLKGCCSCGSCCKFDEDDSEPVLKGVKLHYT

SEQ ID NO: 27 - protein, 1273 aa, Artificial Sequence
  source: /note="Description of Artificial Sequence: Synthetic polypeptide"
MFVFLVLLPLVSSQCVNLTTRTQLPPAYTNSFTRGVYYPDKVFRSSVLHSTQDLFLPFFSNVTWFHAIHVSGTNGTKRFDNPVLPFNDGVYFASTEKSNIIRGWIFGTTLDSKTQSLLIVNNATNVVIKVCEFQFCNDPFLGVYYHKNNKSWMESEFRVYSSANNCTFEYVSQPFLMDLEGKQGNFKNLREFVFKNIDGYFKIYSKHTPINLVRDLPQGFSALEPLVDLPIGINITRFQTLLALHRSYLTPGDSSSGWTAGAAAYYVGYLQPRTFLLKYNENGTITDAVDCALDPLSETKCTLKSFTVEKGIYQTSNFRVQPTESIVRFPNITNLCPFGEVFNATRFASVYAWNRKRISNCVADYSVLYNSASFSTFKCYGVSPTKLNDLCFTNVYADSFVIRGDEVRQIAPGQTGKIADYNYKLPDDFTGCVIAWNSNNLDSKVGGNYNYLYRLFRKSNLKPFERDISTEIYQAGSTPCNGVEGFNCYFPLQSYGFQPTNGVGYQPYRVVVLSFELLHAPATVCGPKKSTNLVKNKCVNFNFNGLTGTGVLTESNKKFLPFQQFGRDIADTTDAVRDPQTLEILDITPCSFGGVSVITPGTNTSNQVAVLYQNVNCTEVPVAIHADQLTPTWRVYSTGSNVFQTRAGCLIGAEHVNNSYECDIPIGAGICASYQTQTNSPRRARSVASQSIIAYTMSLGAENSVAYSNNSIAIPTNFTISVTTEILPVSMTKTSVDCTMYICGDSTECSNLLLQYGSFCTQLNRALTGIAVEQDKNTQEVFAQVKQIYKTPPIKDFGGFNFSQILPDPSKPSKRSFIEDLLFNKVTLADAGFIKQYGDCLGDIAARDLICAQKFNGLTVLPPLLTDEMIAQYTSALLAGTITSGWTFGAGPALQIPFAMQMAYRFNGIGVTQNVLYENQKLIANQFNSAIGKIQDSLSSGPSPLGKLQDVVNQNAQALNTLVKQLSSNFGAISSVLNDILSRLDKPEAEVQIDRLITGRLQSLQTYVTQQLIRAAEIRASANLAATKMSECVLGQSKRVDFCGKGYHLMSFPQSAPHGVVFLHVTYVPAQEKNFTTAPAICHDGKAHFPREGVFVSNGTHWFVTQRNFYEPQIITTDNTFVSGNCDVVIGIVNNTVYDPLQPELDSFKEELDKYFKNHTSPDVDLGDISGINASVVNIQKEIDRLNEVAKNLNESLIDLQELGKYEQYIKWPWYIWLGFIAGLIAIVMVTIMLCCMTSCCSCLKGCCSCGSCCKFDEDDSEPVLKGVKLHYT

SEQ ID NO: 28 - protein, 1273 aa, Artificial Sequence
  source: /note="Description of Artificial Sequence: Synthetic polypeptide"
MFVFLVLLPLVSSQCVNLTTRTQLPPAYTNSFTRGVYYPDKVFRSSVLHSTQDLFLPFFSNVTWFHAIHVSGTNGTKRFDNPVLPFNDGVYFASTEKSNIIRGWIFGTTLDSKTQSLLIVNNATNVVIKVCEFQFCNDPFLGVYYHKNNKSWMESEFRVYSSANNCTFEYVSQPFLMDLEGKQGNFKNLREFVFKNIDGYFKIYSKHTPINLVRDLPQGFSALEPLVDLPIGINITRFQTLLALHRSYLTPGDSSSGWTAGAAAYYVGYLQPRTFLLKYNENGTITDAVDCALDPLSETKCTLKSFTVEKGIYQTSNFRVQPTESIVRFPNITNLCPFGEVFNATRFASVYAWNRKRISNCVADYSVLYNSASFSTFKCYGVSPTKLNDLCFTNVYADSFVIRGDEVRQIAPGQTGKIADYNYKLPDDFTGCVIAWNSNNLDSKVGGNYNYLYRLFRKSNLKPFERDISTEIYQAGSTPCNGVEGFNCYFPLQSYGFQPTNGVGYQPYRVVVLSFELLHAPATVCGPKKSTNLVKNKCVNFNFNGLTGTGVLTESNKKFLPFQQFGRDIADTTDAVRDPQTLEILDITPCSFGGVSVITPGTNTSNQVAVLYQNVNCTEVPVAIHADQLTPTWRVYSTGSNVFQTRAGCLIGAEHVNNSYECDIPIGAGICASYQTQTNSPRRARSVASQSIIAYTMSLGAENSVAYSNNSIAIPTNFTISVTTEILPVSMTKTSVDCTMYICGDSTECSNLLLQYGSFCTQLNRALTGIAVEQDKNTQEVFAQVKQIYKTPPIKDFGGFNFSQILPDPSKPSKRSFIEDLLFNKVTLADAGFIKQYGDCLGDIAARDLICAQKFNGLTVLPPLLTDEMIAQYTSALLAGTITSGWTFGAGPALQIPFAMQMAYRFNGIGVTQNVLYENQKLIANQFNSAIGKIQDSLSSTPGPLGKLQDVVNQNAQALNTLVKQLSSNFGAISSVLNDILSRLDKPEAEVQIDRLITGRLQSLQTYVTQQLIRAAEIRASANLAATKMSECVLGQSKRVDFCGKGYHLMSFPQSAPHGVVFLHVTYVPAQEKNFTTAPAICHDGKAHFPREGVFVSNGTHWFVTQRNFYEPQIITTDNTFVSGNCDVVIGIVNNTVYDPLQPELDSFKEELDKYFKNHTSPDVDLGDISGINASVVNIQKEIDRLNEVAKNLNESLIDLQELGKYEQYIKWPWYIWLGFIAGLIAIVMVTIMLCCMTSCCSCLKGCCSCGSCCKFDEDDSEPVLKGVKLHYT

SEQ ID NO: 29 - protein, 1273 aa, Artificial Sequence
  source: /note="Description of Artificial Sequence: Synthetic polypeptide"
MFVFLVLLPLVSSQCVNLTTRTQLPPAYTNSFTRGVYYPDKVFRSSVLHSTQDLFLPFFSNVTWFHAIHVSGTNGTKRFDNPVLPFNDGVYFASTEKSNIIRGWIFGTTLDSKTQSLLIVNNATNVVIKVCEFQFCNDPFLGVYYHKNNKSWMESEFRVYSSANNCTFEYVSQPFLMDLEGKQGNFKNLREFVFKNIDGYFKIYSKHTPINLVRDLPQGFSALEPLVDLPIGINITRFQTLLALHRSYLTPGDSSSGWTAGAAAYYVGYLQPRTFLLKYNENGTITDAVDCALDPLSETKCTLKSFTVEKGIYQTSNFRVQPTESIVRFPNITNLCPFGEVFNATRFASVYAWNRKRISNCVADYSVLYNSASFSTFKCYGVSPTKLNDLCFTNVYADSFVIRGDEVRQIAPGQTGKIADYNYKLPDDFTGCVIAWNSNNLDSKVGGNYNYLYRLFRKSNLKPFERDISTEIYQAGSTPCNGVEGFNCYFPLQSYGFQPTNGVGYQPYRVVVLSFELLHAPATVCGPKKSTNLVKNKCVNFNFNGLTGTGVLTESNKKFLPFQQFGRDIADTTDAVRDPQTLEILDITPCSFGGVSVITPGTNTSNQVAVLYQDVNCTEVPVAIHADQLTPTWRVYSTGSNVFQTRAGCLIGAEHVNNSYECDIPIGAGICASYQTQTNSPRRARSVASQSIIAYTMSLGAENSVAYSNNSIAIPTNFTISVTTEILPVSMTKTSVDCTMYICGDSTECSNLLLQYGSFCTQLNRALTGIAVEQDKNTQEVFAQVKQIYKTPPIKDFGGFNFSQILPDPSKPSKRSFIEDLLFNKVTLADAGFIKQYGDCLGDIAARDLICAQKFNGLTVLPPLLTDEMIAQYTSALLAGTITSGWTFGAGAALQIPFAMQMAYRFNGIGVTQNVLYENQKLIANQFNSAIGKIQDSLSSGASALGKLQDVVNQNAQALNTLVKQLSSNFGAISSVLNDILSRLDPPEAEVQIDRLITGRLQSLQTYVTQQLIRAAEIRASANLAATKMSECVLGQSKRVDFCGKGYHLMSFPQSAPHGVVFLHVTYVPAQEKNFTTAPAICHDGKAHFPREGVFVSNGTHWFVTQRNFYEPQIITTDNTFVSGNCDVVIGIVNNTVYDPLQPELDSFKEELDKYFKNHTSPDVDLGDISGINASVVNIQKEIDRLNEVAKNLNESLIDLQELGKYEQYIKWPWYIWLGFIAGLIAIVMVTIMLCCMTSCCSCLKGCCSCGSCCKFDEDDSEPVLKGVKLHYT

SEQ ID NO: 30 - protein, 1273 aa, Artificial Sequence
  source: /note="Description of Artificial Sequence: Synthetic polypeptide"
MFVFLVLLPLVSSQCVNLTTRTQLPPAYTNSFTRGVYYPDKVFRSSVLHSTQDLFLPFFSNVTWFHAIHVSGTNGTKRFDNPVLPFNDGVYFASTEKSNIIRGWIFGTTLDSKTQSLLIVNNATNVVIKVCEFQFCNDPFLGVYYHKNNKSWMESEFRVYSSANNCTFEYVSQPFLMDLEGKQGNFKNLREFVFKNIDGYFKIYSKHTPINLVRDLPQGFSALEPLVDLPIGINITRFQTLLALHRSYLTPGDSSSGWTAGAAAYYVGYLQPRTFLLKYNENGTITDAVDCALDPLSETKCTLKSFTVEKGIYQTSNFRVQPTESIVRFPNITNLCPFGEVFNATRFASVYAWNRKRISNCVADYSVLYNSASFSTFKCYGVSPTKLNDLCFTNVYADSFVIRGDEVRQIAPGQTGKIADYNYKLPDDFTGCVIAWNSNNLDSKVGGNYNYLYRLFRKSNLKPFERDISTEIYQAGSTPCNGVEGFNCYFPLQSYGFQPTNGVGYQPYRVVVLSFELLHAPATVCGPKKSTNLVKNKCVNFNFNGLTGTGVLTESNKKFLPFQQFGRDIADTTDAVRDPQTLEILDITPCSFGGVSVITPGTNTSNQVAVLYQDVNCTEVPVAIHADQLTPTWRVYSTGSNVFQTRAGCLIGAEHVNNSYECDIPIGAGICASYQTQTNSPRRARSVASQSIIAYTMSLGAENSVAYSNNSIAIPTNFTISVTTEILPVSMTKTSVDCTMYICGDSTECSNLLLQYGSFCTQLNRALTGIAVEQDKNTQEVFAQVKQIYKTPPIKDFGGFNFSQILPDPSKPSKRSFIEDLLFNKVTLADAGFIKQYGDCLGDIAARDLICAQKFNGLTVLPPLLTDEMIAQYTSALLAGTITSGWTFGAGAALQIPFAMQMAYRFNGIGVTQNVLYENQKLIANQFNSAIGKIQDSLSSTAGALGKLQDVVNQNAQALNTLVKQLSSNFGAISSVLNDILSRLDPPEAEVQIDRLITGRLQSLQTYVTQQLIRAAEIRASANLAATKMSECVLGQSKRVDFCGKGYHLMSFPQSAPHGVVFLHVTYVPAQEKNFTTAPAICHDGKAHFPREGVFVSNGTHWFVTQRNFYEPQIITTDNTFVSGNCDVVIGIVNNTVYDPLQPELDSFKEELDKYFKNHTSPDVDLGDISGINASVVNIQKEIDRLNEVAKNLNESLIDLQELGKYEQYIKWPWYIWLGFIAGLIAIVMVTIMLCCMTSCCSCLKGCCSCGSCCKFDEDDSEPVLKGVKLHYT

SEQ ID NO: 31 - protein, 1273 aa, Artificial Sequence
  source: /note="Description of Artificial Sequence: Synthetic polypeptide"
MFVFLVLLPLVSSQCVNLTTRTQLPPAYTNSFTRGVYYPDKVFRSSVLHSTQDLFLPFFSNVTWFHAIHVSGTNGTKRFDNPVLPFNDGVYFASTEKSNIIRGWIFGTTLDSKTQSLLIVNNATNVVIKVCEFQFCNDPFLGVYYHKNNKSWMESEFRVYSSANNCTFEYVSQPFLMDLEGKQGNFKNLREFVFKNIDGYFKIYSKHTPINLVRDLPQGFSALEPLVDLPIGINITRFQTLLALHRSYLTPGDSSSGWTAGAAAYYVGYLQPRTFLLKYNENGTITDAVDCALDPLSETKCTLKSFTVEKGIYQTSNFRVQPTESIVRFPNITNLCPFGEVFNATRFASVYAWNRKRISNCVADYSVLYNSASFSTFKCYGVSPTKLNDLCFTNVYADSFVIRGDEVRQIAPGQTGKIADYNYKLPDDFTGCVIAWNSNNLDSKVGGNYNYLYRLFRKSNLKPFERDISTEIYQAGSTPCNGVEGFNCYFPLQSYGFQPTNGVGYQPYRVVVLSFELLHAPATVCGPKKSTNLVKNKCVNFNFNGLTGTGVLTESNKKFLPFQQFGRDIADTTDAVRDPQTLEILDITPCSFGGVSVITPGTNTSNQVAVLYQNVNCTEVPVAIHADQLTPTWRVYSTGSNVFQTRAGCLIGAEHVNNSYECDIPIGAGICASYQTQTNSPRRARSVASQSIIAYTMSLGAENSVAYSNNSIAIPTNFTISVTTEILPVSMTKTSVDCTMYICGDSTECSNLLLQYGSFCTQLNRALTGIAVEQDKNTQEVFAQVKQIYKTPPIKDFGGFNFSQILPDPSKPSKRSFIEDLLFNKVTLADAGFIKQYGDCLGDIAARDLICAQKFNGLTVLPPLLTDEMIAQYTSALLAGTITSGWTFGAGPALQIPFAMQMAYRFNGIGVTQNVLYENQKLIANQFNSAIGKIQDSLSSGPSALGKLQDVVNQNAQALNTLVKQLSSNFGAISSVLNDILSRLDPPEAEVQIDRLITGRLQSLQTYVTQQLIRAAEIRASANLAATKMSECVLGQSKRVDFCGKGYHLMSFPQSAPHGVVFLHVTYVPAQEKNFTTAPAICHDGKAHFPREGVFVSNGTHWFVTQRNFYEPQIITTDNTFVSGNCDVVIGIVNNTVYDPLQPELDSFKEELDKYFKNHTSPDVDLGDISGINASVVNIQKEIDRLNEVAKNLNESLIDLQELGKYEQYIKWPWYIWLGFIAGLIAIVMVTIMLCCMTSCCSCLKGCCSCGSCCKFDEDDSEPVLKGVKLHYT

SEQ ID NO: 32 - protein, 1273 aa, Artificial Sequence
  source: /note="Description of Artificial Sequence: Synthetic polypeptide"
MFVFLVLLPLVSSQCVNLTTRTQLPPAYTNSFTRGVYYPDKVFRSSVLHSTQDLFLPFFSNVTWFHAIHVSGTNGTKRFDNPVLPFNDGVYFASTEKSNIIRGWIFGTTLDSKTQSLLIVNNATNVVIKVCEFQFCNDPFLGVYYHKNNKSWMESEFRVYSSANNCTFEYVSQPFLMDLEGKQGNFKNLREFVFKNIDGYFKIYSKHTPINLVRDLPQGFSALEPLVDLPIGINITRFQTLLALHRSYLTPGDSSSGWTAGAAAYYVGYLQPRTFLLKYNENGTITDAVDCALDPLSETKCTLKSFTVEKGIYQTSNFRVQPTESIVRFPNITNLCPFGEVFNATRFASVYAWNRKRISNCVADYSVLYNSASFSTFKCYGVSPTKLNDLCFTNVYADSFVIRGDEVRQIAPGQTGKIADYNYKLPDDFTGCVIAWNSNNLDSKVGGNYNYLYRLFRKSNLKPFERDISTEIYQAGSTPCNGVEGFNCYFPLQSYGFQPTNGVGYQPYRVVVLSFELLHAPATVCGPKKSTNLVKNKCVNFNFNGLTGTGVLTESNKKFLPFQQFGRDIADTTDAVRDPQTLEILDITPCSFGGVSVITPGTNTSNQVAVLYQNVNCTEVPVAIHADQLTPTWRVYSTGSNVFQTRAGCLIGAEHVNNSYECDIPIGAGICASYQTQTNSPRRARSVASQSIIAYTMSLGAENSVAYSNNSIAIPTNFTISVTTEILPVSMTKTSVDCTMYICGDSTECSNLLLQYGSFCTQLNRALTGIAVEQDKNTQEVFAQVKQIYKTPPIKDFGGFNFSQILPDPSKPSKRSFIEDLLFNKVTLADAGFIKQYGDCLGDIAARDLICAQKFNGLTVLPPLLTDEMIAQYTSALLAGTITSGWTFGAGPALQIPFAMQMAYRFNGIGVTQNVLYENQKLIANQFNSAIGKIQDSLSSTPGALGKLQDVVNQNAQALNTLVKQLSSNFGAISSVLNDILSRLDPPEAEVQIDRLITGRLQSLQTYVTQQLIRAAEIRASANLAATKMSECVLGQSKRVDFCGKGYHLMSFPQSAPHGVVFLHVTYVPAQEKNFTTAPAICHDGKAHFPREGVFVSNGTHWFVTQRNFYEPQIITTDNTFVSGNCDVVIGIVNNTVYDPLQPELDSFKEELDKYFKNHTSPDVDLGDISGINASVVNIQKEIDRLNEVAKNLNESLIDLQELGKYEQYIKWPWYIWLGFIAGLIAIVMVTIMLCCMTSCCSCLKGCCSCGSCCKFDEDDSEPVLKGVKLHYT

SEQ ID NO: 33 - protein, 1273 aa, Artificial Sequence
  source: /note="Description of Artificial Sequence: Synthetic polypeptide"
MFVFLVLLPLVSSQCVNLTTRTQLPPAYTNSFTRGVYYPDKVFRSSVLHSTQDLFLPFFSNVTWFHAIHVSGTNGTKRFDNPVLPFNDGVYFASTEKSNIIRGWIFGTTLDSKTQSLLIVNNATNVVIKVCEFQFCNDPFLGVYYHKNNKSWMESEFRVYSSANNCTFEYVSQPFLMDLEGKQGNFKNLREFVFKNIDGYFKIYSKHTPINLVRDLPQGFSALEPLVDLPIGINITRFQTLLALHRSYLTPGDSSSGWTAGAAAYYVGYLQPRTFLLKYNENGTITDAVDCALDPLSETKCTLKSFTVEKGIYQTSNFRVQPTESIVRFPNITNLCPFGEVFNATRFASVYAWNRKRISNCVADYSVLYNSASFSTFKCYGVSPTKLNDLCFTNVYADSFVIRGDEVRQIAPGQTGKIADYNYKLPDDFTGCVIAWNSNNLDSKVGGNYNYLYRLFRKSNLKPFERDISTEIYQAGSTPCNGVEGFNCYFPLQSYGFQPTNGVGYQPYRVVVLSFELLHAPATVCGPKKSTNLVKNKCVNFNFNGLTGTGVLTESNKKFLPFQQFGRDIADTTDAVRDPQTLEILDITPCSFGGVSVITPGTNTSNQVAVLYQNVNCTEVPVAIHADQLTPTWRVYSTGSNVFQTRAGCLIGAEHVNNSYECDIPIGAGICASYQTQTNSPRRARSVASQSIIAYTMSLGAENSVAYSNNSIAIPTNFTISVTTEILPVSMTKTSVDCTMYICGDSTECSNLLLQYGSFCTQLNRALTGIAVEQDKNTQEVFAQVKQIYKTPPIKDFGGFNFSQILPDPSKPSKRSFIEDLLFNKVTLADAGFIKQYGDCLGDIAARDLICAQKFNGLTVLPPLLTDEMIAQYTSALLAGTITSGWTFGAGPALQIPFAMQMAYRFNGIGVTQNVLYENQKLIANQFNSAIGKIQDSLSSGPGALGKLQDVVNQNAQALNTLVKQLSSNFGAISSVLNDILSRLDPPEAEVQIDRLITGRLQSLQTYVTQQLIRAAEIRASANLAATKMSECVLGQSKRVDFCGKGYHLMSFPQSAPHGVVFLHVTYVPAQEKNFTTAPAICHDGKAHFPREGVFVSNGTHWFVTQRNFYEPQIITTDNTFVSGNCDVVIGIVNNTVYDPLQPELDSFKEELDKYFKNHTSPDVDLGDISGINASVVNIQKEIDRLNEVAKNLNESLIDLQELGKYEQYIKWPWYIWLGFIAGLIAIVMVTIMLCCMTSCCSCLKGCCSCGSCCKFDEDDSEPVLKGVKLHYT

SEQ ID NO: 34 - protein, 1273 aa, Artificial Sequence
  source: /note="Description of Artificial Sequence: Synthetic polypeptide"
MFVFLVLLPLVSSQCVNLTTRTQLPPAYTNSFTRGVYYPDKVFRSSVLHSTQDLFLPFFSNVTWFHAIHVSGTNGTKRFDNPVLPFNDGVYFASTEKSNIIRGWIFGTTLDSKTQSLLIVNNATNVVIKVCEFQFCNDPFLGVYYHKNNKSWMESEFRVYSSANNCTFEYVSQPFLMDLEGKQGNFKNLREFVFKNIDGYFKIYSKHTPINLVRDLPQGFSALEPLVDLPIGINITRFQTLLALHRSYLTPGDSSSGWTAGAAAYYVGYLQPRTFLLKYNENGTITDAVDCALDPLSETKCTLKSFTVEKGIYQTSNFRVQPTESIVRFPNITNLCPFGEVFNATRFASVYAWNRKRISNCVADYSVLYNSASFSTFKCYGVSPTKLNDLCFTNVYADSFVIRGDEVRQIAPGQTGKIADYNYKLPDDFTGCVIAWNSNNLDSKVGGNYNYLYRLFRKSNLKPFERDISTEIYQAGSTPCNGVEGFNCYFPLQSYGFQPTNGVGYQPYRVVVLSFELLHAPATVCGPKKSTNLVKNKCVNFNFNGLTGTGVLTESNKKFLPFQQFGRDIADTTDAVRDPQTLEILDITPCSFGGVSVITPGTNTSNQVAVLYQNVNCTEVPVAIHADQLTPTWRVYSTGSNVFQTRAGCLIGAEHVNNSYECDIPIGAGICASYQTQTNSPRRARSVASQSIIAYTMSLGAENSVAYSNNSIAIPTNFTISVTTEILPVSMTKTSVDCTMYICGDSTECSNLLLQYGSFCTQLNRALTGIAVEQDKNTQEVFAQVKQIYKTPPIKDFGGFNFSQILPDPSKPSKRSFIEDLLFNKVTLADAGFIKQYGDCLGDIAARDLICAQKFNGLTVLPPLLTDEMIAQYTSALLAGTITSGWTFGAGPALQIPFAMQMAYRFNGIGVTQNVLYENQKLIANQFNSAIGKIQDSLSSGPSPLGKLQDVVNQNAQALNTLVKQLSSNFGAISSVLNDILSRLDPPEAEVQIDRLITGRLQSLQTYVTQQLIRAAEIRASANLAATKMSECVLGQSKRVDFCGKGYHLMSFPQSAPHGVVFLHVTYVPAQEKNFTTAPAICHDGKAHFPREGVFVSNGTHWFVTQRNFYEPQIITTDNTFVSGNCDVVIGIVNNTVYDPLQPELDSFKEELDKYFKNHTSPDVDLGDISGINASVVNIQKEIDRLNEVAKNLNESLIDLQELGKYEQYIKWPWYIWLGFIAGLIAIVMVTIMLCCMTSCCSCLKGCCSCGSCCKFDEDDSEPVLKGVKLHYT

SEQ ID NO: 35 - protein, 1273 aa, Artificial Sequence
  source: /note="Description of Artificial Sequence: Synthetic polypeptide"
MFVFLVLLPLVSSQCVNLTTRTQLPPAYTNSFTRGVYYPDKVFRSSVLHSTQDLFLPFFSNVTWFHAIHVSGTNGTKRFDNPVLPFNDGVYFASTEKSNIIRGWIFGTTLDSKTQSLLIVNNATNVVIKVCEFQFCNDPFLGVYYHKNNKSWMESEFRVYSSANNCTFEYVSQPFLMDLEGKQGNFKNLREFVFKNIDGYFKIYSKHTPINLVRDLPQGFSALEPLVDLPIGINITRFQTLLALHRSYLTPGDSSSGWTAGAAAYYVGYLQPRTFLLKYNENGTITDAVDCALDPLSETKCTLKSFTVEKGIYQTSNFRVQPTESIVRFPNITNLCPFGEVFNATRFASVYAWNRKRISNCVADYSVLYNSASFSTFKCYGVSPTKLNDLCFTNVYADSFVIRGDEVRQIAPGQTGKIADYNYKLPDDFTGCVIAWNSNNLDSKVGGNYNYLYRLFRKSNLKPFERDISTEIYQAGSTPCNGVEGFNCYFPLQSYGFQPTNGVGYQPYRVVVLSFELLHAPATVCGPKKSTNLVKNKCVNFNFNGLTGTGVLTESNKKFLPFQQFGRDIADTTDAVRDPQTLEILDITPCSFGGVSVITPGTNTSNQVAVLYQNVNCTEVPVAIHADQLTPTWRVYSTGSNVFQTRAGCLIGAEHVNNSYECDIPIGAGICASYQTQTNSPRRARSVASQSIIAYTMSLGAENSVAYSNNSIAIPTNFTISVTTEILPVSMTKTSVDCTMYICGDSTECSNLLLQYGSFCTQLNRALTGIAVEQDKNTQEVFAQVKQIYKTPPIKDFGGFNFSQILPDPSKPSKRSFIEDLLFNKVTLADAGFIKQYGDCLGDIAARDLICAQKFNGLTVLPPLLTDEMIAQYTSALLAGTITSGWTFGAGPALQIPFAMQMAYRFNGIGVTQNVLYENQKLIANQFNSAIGKIQDSLSSTPGPLGKLQDVVNQNAQALNTLVKQLSSNFGAISSVLNDILSRLDPPEAEVQIDRLITGRLQSLQTYVTQQLIRAAEIRASANLAATKMSECVLGQSKRVDFCGKGYHLMSFPQSAPHGVVFLHVTYVPAQEKNFTTAPAICHDGKAHFPREGVFVSNGTHWFVTQRNFYEPQIITTDNTFVSGNCDVVIGIVNNTVYDPLQPELDSFKEELDKYFKNHTSPDVDLGDISGINASVVNIQKEIDRLNEVAKNLNESLIDLQELGKYEQYIKWPWYIWLGFIAGLIAIVMVTIMLCCMTSCCSCLKGCCSCGSCCKFDEDDSEPVLKGVKLHYT

SEQ ID NO: 36 - protein, 1273 aa, Artificial Sequence
  source: /note="Description of Artificial Sequence: Synthetic polypeptide"
MFVFLVLLPLVSSQCVNLTTRTQLPPAYTNSFTRGVYYPDKVFRSSVLHSTQDLFLPFFSNVTWFHAIHVSGTNGTKRFDNPVLPFNDGVYFASTEKSNIIRGWIFGTTLDSKTQSLLIVNNATNVVIKVCEFQFCNDPFLGVYYHKNNKSWMESEFRVYSSANNCTFEYVSQPFLMDLEGKQGNFKNLREFVFKNIDGYFKIYSKHTPINLVRDLPQGFSALEPLVDLPIGINITRFQTLLALHRSYLTPGDSSSGWTAGAAAYYVGYLQPRTFLLKYNENGTITDAVDCALDPLSETKCTLKSFTVEKGIYQTSNFRVQPTESIVRFPNITNLCPFGEVFNATRFASVYAWNRKRISNCVADYSVLYNSASFSTFKCYGVSPTKLNDLCFTNVYADSFVIRGDEVRQIAPGQTGKIADYNYKLPDDFTGCVIAWNSNNLDSKVGGNYNYLYRLFRKSNLKPFERDISTEIYQAGSTPCNGVEGFNCYFPLQSYGFQPTNGVGYQPYRVVVLSFELLHAPATVCGPKKSTNLVKNKCVNFNFNGLTGTGVLTESNKKFLPFQQFGRDIADTTDAVRDPQTLEILDITPCSFGGVSVITPGTNTSNQVAVLYQDVNCTEVPVAIHADQLTPTWRVYSTGSNVFQTRAGCLIGAEHVNNSYECDIPIGAGICASYQTQTNSPSRAGSVASQSIIAYTMSLGAENSVAYSNNSIAIPTNFTISVTTEILPVSMTKTSVDCTMYICGDSTECSNLLLQYGSFCTQLNRALTGIAVEQDKNTQEVFAQVKQIYKTPPIKDFGGFNFSQILPDPSKPSKRSFIEDLLFNKVTLADAGFIKQYGDCLGDIAARDLICAQKFNGLTVLPPLLTDEMIAQYTSALLAGTITSGWTFGAGAALQIPFAMQMAYRFNGIGVTQNVLYENQKLIANQFNSAIGKIQDSLSSGASALGKLQDVVNQNAQALNTLVKQLSSNFGAISSVLNDILSRLDKVEAEVQIDRLITGRLQSLQTYVTQQLIRAAEIRASANLAATKMSECVLGQSKRVDFCGKGYHLMSFPQSAPHGVVFLHVTYVPAQEKNFTTAPAICHDGKAHFPREGVFVSNGTHWFVTQRNFYEPQIITTDNTFVSGNCDVVIGIVNNTVYDPLQPELDSFKEELDKYFKNHTSPDVDLGDISGINASVVNIQKEIDRLNEVAKNLNESLIDLQELGKYEQYIKWPWYIWLGFIAGLIAIVMVTIMLCCMTSCCSCLKGCCSCGSCCKFDEDDSEPVLKGVKLHYT

SEQ ID NO: 37 - protein, 1273 aa, Artificial Sequence
  source: /note="Description of Artificial Sequence: Synthetic polypeptide"
MFVFLVLLPLVSSQCVNLTTRTQLPPAYTNSFTRGVYYPDKVFRSSVLHSTQDLFLPFFSNVTWFHAIHVSGTNGTKRFDNPVLPFNDGVYFASTEKSNIIRGWIFGTTLDSKTQSLLIVNNATNVVIKVCEFQFCNDPFLGVYYHKNNKSWMESEFRVYSSANNCTFEYVSQPFLMDLEGKQGNFKNLREFVFKNIDGYFKIYSKHTPINLVRDLPQGFSALEPLVDLPIGINITRFQTLLALHRSYLTPGDSSSGWTAGAAAYYVGYLQPRTFLLKYNENGTITDAVDCALDPLSETKCTLKSFTVEKGIYQTSNFRVQPTESIVRFPNITNLCPFGEVFNATRFASVYAWNRKRISNCVADYSVLYNSASFSTFKCYGVSPTKLNDLCFTNVYADSFVIRGDEVRQIAPGQTGKIADYNYKLPDDFTGCVIAWNSNNLDSKVGGNYNYLYRLFRKSNLKPFERDISTEIYQAGSTPCNGVEGFNCYFPLQSYGFQPTNGVGYQPYRVVVLSFELLHAPATVCGPKKSTNLVKNKCVNFNFNGLTGTGVLTESNKKFLPFQQFGRDIADTTDAVRDPQTLEILDITPCSFGGVSVITPGTNTSNQVAVLYQDVNCTEVPVAIHADQLTPTWRVYSTGSNVFQTRAGCLIGAEHVNNSYECDIPIGAGICASYQTQTNSPSRAGSVASQSIIAYTMSLGAENSVAYSNNSIAIPTNFTISVTTEILPVSMTKTSVDCTMYICGDSTECSNLLLQYGSFCTQLNRALTGIAVEQDKNTQEVFAQVKQIYKTPPIKDFGGFNFSQILPDPSKPSKRSFIEDLLFNKVTLADAGFIKQYGDCLGDIAARDLICAQKFNGLTVLPPLLTDEMIAQYTSALLAGTITSGWTFGAGAALQIPFAMQMAYRFNGIGVTQNVLYENQKLIANQFNSAIGKIQDSLSSTAGALGKLQDVVNQNAQALNTLVKQLSSNFGAISSVLNDILSRLDKVEAEVQIDRLITGRLQSLQTYVTQQLIRAAEIRASANLAATKMSECVLGQSKRVDFCGKGYHLMSFPQSAPHGVVFLHVTYVPAQEKNFTTAPAICHDGKAHFPREGVFVSNGTHWFVTQRNFYEPQIITTDNTFVSGNCDVVIGIVNNTVYDPLQPELDSFKEELDKYFKNHTSPDVDLGDISGINASVVNIQKEIDRLNEVAKNLNESLIDLQELGKYEQYIKWPWYIWLGFIAGLIAIVMVTIMLCCMTSCCSCLKGCCSCGSCCKFDEDDSEPVLKGVKLHYT

SEQ ID NO: 38 - protein, 1273 aa, Artificial Sequence
  source: /note="Description of Artificial Sequence: Synthetic polypeptide"
MFVFLVLLPLVSSQCVNLTTRTQLPPAYTNSFTRGVYYPDKVFRSSVLHSTQDLFLPFFSNVTWFHAIHVSGTNGTKRFDNPVLPFNDGVYFASTEKSNIIRGWIFGTTLDSKTQSLLIVNNATNVVIKVCEFQFCNDPFLGVYYHKNNKSWMESEFRVYSSANNCTFEYVSQPFLMDLEGKQGNFKNLREFVFKNIDGYFKIYSKHTPINLVRDLPQGFSALEPLVDLPIGINITRFQTLLALHRSYLTPGDSSSGWTAGAAAYYVGYLQPRTFLLKYNENGTITDAVDCALDPLSETKCTLKSFTVEKGIYQTSNFRVQPTESIVRFPNITNLCPFGEVFNATRFASVYAWNRKRISNCVADYSVLYNSASFSTFKCYGVSPTKLNDLCFTNVYADSFVIRGDEVRQIAPGQTGKIADYNYKLPDDFTGCVIAWNSNNLDSKVGGNYNYLYRLFRKSNLKPFERDISTEIYQAGSTPCNGVEGFNCYFPLQSYGFQPTNGVGYQPYRVVVLSFELLHAPATVCGPKKSTNLVKNKCVNFNFNGLTGTGVLTESNKKFLPFQQFGRDIADTTDAVRDPQTLEILDITPCSFGGVSVITPGTNTSNQVAVLYQNVNCTEVPVAIHADQLTPTWRVYSTGSNVFQTRAGCLIGAEHVNNSYECDIPIGAGICASYQTQTNSPSRAGSVASQSIIAYTMSLGAENSVAYSNNSIAIPTNFTISVTTEILPVSMTKTSVDCTMYICGDSTECSNLLLQYGSFCTQLNRALTGIAVEQDKNTQEVFAQVKQIYKTPPIKDFGGFNFSQILPDPSKPSKRSFIEDLLFNKVTLADAGFIKQYGDCLGDIAARDLICAQKFNGLTVLPPLLTDEMIAQYTSALLAGTITSGWTFGAGPALQIPFAMQMAYRFNGIGVTQNVLYENQKLIANQFNSAIGKIQDSLSSGPSALGKLQDVVNQNAQALNTLVKQLSSNFGAISSVLNDILSRLDKVEAEVQIDRLITGRLQSLQTYVTQQLIRAAEIRASANLAATKMSECVLGQSKRVDFCGKGYHLMSFPQSAPHGVVFLHVTYVPAQEKNFTTAPAICHDGKAHFPREGVFVSNGTHWFVTQRNFYEPQIITTDNTFVSGNCDVVIGIVNNTVYDPLQPELDSFKEELDKYFKNHTSPDVDLGDISGINASVVNIQKEIDRLNEVAKNLNESLIDLQELGKYEQYIKWPWYIWLGFIAGLIAIVMVTIMLCCMTSCCSCLKGCCSCGSCCKFDEDDSEPVLKGVKLHYT

SEQ ID NO: 39 - protein, 1273 aa, Artificial Sequence
  source: /note="Description of Artificial Sequence: Synthetic polypeptide"
MFVFLVLLPLVSSQCVNLTTRTQLPPAYTNSFTRGVYYPDKVFRSSVLHSTQDLFLPFFSNVTWFHAIHVSGTNGTKRFDNPVLPFNDGVYFASTEKSNIIRGWIFGTTLDSKTQSLLIVNNATNVVIKVCEFQFCNDPFLGVYYHKNNKSWMESEFRVYSSANNCTFEYVSQPFLMDLEGKQGNFKNLREFVFKNIDGYFKIYSKHTPINLVRDLPQGFSALEPLVDLPIGINITRFQTLLALHRSYLTPGDSSSGWTAGAAAYYVGYLQPRTFLLKYNENGTITDAVDCALDPLSETKCTLKSFTVEKGIYQTSNFRVQPTESIVRFPNITNLCPFGEVFNATRFASVYAWNRKRISNCVADYSVLYNSASFSTFKCYGVSPTKLNDLCFTNVYADSFVIRGDEVRQIAPGQTGKIADYNYKLPDDFTGCVIAWNSNNLDSKVGGNYNYLYRLFRKSNLKPFERDISTEIYQAGSTPCNGVEGFNCYFPLQSYGFQPTNGVGYQPYRVVVLSFELLHAPATVCGPKKSTNLVKNKCVNFNFNGLTGTGVLTESNKKFLPFQQFGRDIADTTDAVRDPQTLEILDITPCSFGGVSVITPGTNTSNQVAVLYQNVNCTEVPVAIHADQLTPTWRVYSTGSNVFQTRAGCLIGAEHVNNSYECDIPIGAGICASYQTQTNSPSRAGSVASQSIIAYTMSLGAENSVAYSNNSIAIPTNFTISVTTEILPVSMTKTSVDCTMYICGDSTECSNLLLQYGSFCTQLNRALTGIAVEQDKNTQEVFAQVKQIYKTPPIKDFGGFNFSQILPDPSKPSKRSFIEDLLFNKVTLADAGFIKQYGDCLGDIAARDLICAQKFNGLTVLPPLLTDEMIAQYTSALLAGTITSGWTFGAGPALQIPFAMQMAYRFNGIGVTQNVLYENQKLIANQFNSAIGKIQDSLSSTPGALGKLQDVVNQNAQALNTLVKQLSSNFGAISSVLNDILSRLDKVEAEVQIDRLITGRLQSLQTYVTQQLIRAAEIRASANLAATKMSECVLGQSKRVDFCGKGYHLMSFPQSAPHGVVFLHVTYVPAQEKNFTTAPAICHDGKAHFPREGVFVSNGTHWFVTQRNFYEPQIITTDNTFVSGNCDVVIGIVNNTVYDPLQPELDSFKEELDKYFKNHTSPDVDLGDISGINASVVNIQKEIDRLNEVAKNLNESLIDLQELGKYEQYIKWPWYIWLGFIAGLIAIVMVTIMLCCMTSCCSCLKGCCSCGSCCKFDEDDSEPVLKGVKLHYT

SEQ ID NO: 40 - protein, 1273 aa, Artificial Sequence
  source: /note="Description of Artificial Sequence: Synthetic polypeptide"
MFVFLVLLPLVSSQCVNLTTRTQLPPAYTNSFTRGVYYPDKVFRSSVLHSTQDLFLPFFSNVTWFHAIHVSGTNGTKRFDNPVLPFNDGVYFASTEKSNIIRGWIFGTTLDSKTQSLLIVNNATNVVIKVCEFQFCNDPFLGVYYHKNNKSWMESEFRVYSSANNCTFEYVSQPFLMDLEGKQGNFKNLREFVFKNIDGYFKIYSKHTPINLVRDLPQGFSALEPLVDLPIGINITRFQTLLALHRSYLTPGDSSSGWTAGAAAYYVGYLQPRTFLLKYNENGTITDAVDCALDPLSETKCTLKSFTVEKGIYQTSNFRVQPTESIVRFPNITNLCPFGEVFNATRFASVYAWNRKRISNCVADYSVLYNSASFSTFKCYGVSPTKLNDLCFTNVYADSFVIRGDEVRQIAPGQTGKIADYNYKLPDDFTGCVIAWNSNNLDSKVGGNYNYLYRLFRKSNLKPFERDISTEIYQAGSTPCNGVEGFNCYFPLQSYGFQPTNGVGYQPYRVVVLSFELLHAPATVCGPKKSTNLVKNKCVNFNFNGLTGTGVLTESNKKFLPFQQFGRDIADTTDAVRDPQTLEILDITPCSFGGVSVITPGTNTSNQVAVLYQNVNCTEVPVAIHADQLTPTWRVYSTGSNVFQTRAGCLIGAEHVNNSYECDIPIGAGICASYQTQTNSPSRAGSVASQSIIAYTMSLGAENSVAYSNNSIAIPTNFTISVTTEILPVSMTKTSVDCTMYICGDSTECSNLLLQYGSFCTQLNRALTGIAVEQDKNTQEVFAQVKQIYKTPPIKDFGGFNFSQILPDPSKPSKRSFIEDLLFNKVTLADAGFIKQYGDCLGDIAARDLICAQKFNGLTVLPPLLTDEMIAQYTSALLAGTITSGWTFGAGPALQIPFAMQMAYRFNGIGVTQNVLYENQKLIANQFNSAIGKIQDSLSSGPGALGKLQDVVNQNAQALNTLVKQLSSNFGAISSVLNDILSRLDKVEAEVQIDRLITGRLQSLQTYVTQQLIRAAEIRASANLAATKMSECVLGQSKRVDFCGKGYHLMSFPQSAPHGVVFLHVTYVPAQEKNFTTAPAICHDGKAHFPREGVFVSNGTHWFVTQRNFYEPQIITTDNTFVSGNCDVVIGIVNNTVYDPLQPELDSFKEELDKYFKNHTSPDVDLGDISGINASVVNIQKEIDRLNEVAKNLNESLIDLQELGKYEQYIKWPWYIWLGFIAGLIAIVMVTIMLCCMTSCCSCLKGCCSCGSCCKFDEDDSEPVLKGVKLHYT

SEQ ID NO: 41 - protein, 1273 aa, Artificial Sequence
  source: /note="Description of Artificial Sequence: Synthetic polypeptide"
MFVFLVLLPLVSSQCVNLTTRTQLPPAYTNSFTRGVYYPDKVFRSSVLHSTQDLFLPFFSNVTWFHAIHVSGTNGTKRFDNPVLPFNDGVYFASTEKSNIIRGWIFGTTLDSKTQSLLIVNNATNVVIKVCEFQFCNDPFLGVYYHKNNKSWMESEFRVYSSANNCTFEYVSQPFLMDLEGKQGNFKNLREFVFKNIDGYFKIYSKHTPINLVRDLPQGFSALEPLVDLPIGINITRFQTLLALHRSYLTPGDSSSGWTAGAAAYYVGYLQPRTFLLKYNENGTITDAVDCALDPLSETKCTLKSFTVEKGIYQTSNFRVQPTESIVRFPNITNLCPFGEVFNATRFASVYAWNRKRISNCVADYSVLYNSASFSTFKCYGVSPTKLNDLCFTNVYADSFVIRGDEVRQIAPGQTGKIADYNYKLPDDFTGCVIAWNSNNLDSKVGGNYNYLYRLFRKSNLKPFERDISTEIYQAGSTPCNGVEGFNCYFPLQSYGFQPTNGVGYQPYRVVVLSFELLHAPATVCGPKKSTNLVKNKCVNFNFNGLTGTGVLTESNKKFLPFQQFGRDIADTTDAVRDPQTLEILDITPCSFGGVSVITPGTNTSNQVAVLYQNVNCTEVPVAIHADQLTPTWRVYSTGSNVFQTRAGCLIGAEHVNNSYECDIPIGAGICASYQTQTNSPSRAGSVASQSIIAYTMSLGAENSVAYSNNSIAIPTNFTISVTTEILPVSMTKTSVDCTMYICGDSTECSNLLLQYGSFCTQLNRALTGIAVEQDKNTQEVFAQVKQIYKTPPIKDFGGFNFSQILPDPSKPSKRSFIEDLLFNKVTLADAGFIKQYGDCLGDIAARDLICAQKFNGLTVLPPLLTDEMIAQYTSALLAGTITSGWTFGAGPALQIPFAMQMAYRFNGIGVTQNVLYENQKLIANQFNSAIGKIQDSLSSGPSPLGKLQDVVNQNAQALNTLVKQLSSNFGAISSVLNDILSRLDKVEAEVQIDRLITGRLQSLQTYVTQQLIRAAEIRASANLAATKMSECVLGQSKRVDFCGKGYHLMSFPQSAPHGVVFLHVTYVPAQEKNFTTAPAICHDGKAHFPREGVFVSNGTHWFVTQRNFYEPQIITTDNTFVSGNCDVVIGIVNNTVYDPLQPELDSFKEELDKYFKNHTSPDVDLGDISGINASVVNIQKEIDRLNEVAKNLNESLIDLQELGKYEQYIKWPWYIWLGFIAGLIAIVMVTIMLCCMTSCCSCLKGCCSCGSCCKFDEDDSEPVLKGVKLHYT

SEQ ID NO: 42 - protein, 1273 aa, Artificial Sequence
  source: /note="Description of Artificial Sequence: Synthetic polypeptide"
MFVFLVLLPLVSSQCVNLTTRTQLPPAYTNSFTRGVYYPDKVFRSSVLHSTQDLFLPFFSNVTWFHAIHVSGTNGTKRFDNPVLPFNDGVYFASTEKSNIIRGWIFGTTLDSKTQSLLIVNNATNVVIKVCEFQFCNDPFLGVYYHKNNKSWMESEFRVYSSANNCTFEYVSQPFLMDLEGKQGNFKNLREFVFKNIDGYFKIYSKHTPINLVRDLPQGFSALEPLVDLPIGINITRFQTLLALHRSYLTPGDSSSGWTAGAAAYYVGYLQPRTFLLKYNENGTITDAVDCALDPLSETKCTLKSFTVEKGIYQTSNFRVQPTESIVRFPNITNLCPFGEVFNATRFASVYAWNRKRISNCVADYSVLYNSASFSTFKCYGVSPTKLNDLCFTNVYADSFVIRGDEVRQIAPGQTGKIADYNYKLPDDFTGCVIAWNSNNLDSKVGGNYNYLYRLFRKSNLKPFERDISTEIYQAGSTPCNGVEGFNCYFPLQSYGFQPTNGVGYQPYRVVVLSFELLHAPATVCGPKKSTNLVKNKCVNFNFNGLTGTGVLTESNKKFLPFQQFGRDIADTTDAVRDPQTLEILDITPCSFGGVSVITPGTNTSNQVAVLYQNVNCTEVPVAIHADQLTPTWRVYSTGSNVFQTRAGCLIGAEHVNNSYECDIPIGAGICASYQTQTNSPSRAGSVASQSIIAYTMSLGAENSVAYSNNSIAIPTNFTISVTTEILPVSMTKTSVDCTMYICGDSTECSNLLLQYGSFCTQLNRALTGIAVEQDKNTQEVFAQVKQIYKTPPIKDFGGFNFSQILPDPSKPSKRSFIEDLLFNKVTLADAGFIKQYGDCLGDIAARDLICAQKFNGLTVLPPLLTDEMIAQYTSALLAGTITSGWTFGAGPALQIPFAMQMAYRFNGIGVTQNVLYENQKLIANQFNSAIGKIQDSLSSTPGPLGKLQDVVNQNAQALNTLVKQLSSNFGAISSVLNDILSRLDKVEAEVQIDRLITGRLQSLQTYVTQQLIRAAEIRASANLAATKMSECVLGQSKRVDFCGKGYHLMSFPQSAPHGVVFLHVTYVPAQEKNFTTAPAICHDGKAHFPREGVFVSNGTHWFVTQRNFYEPQIITTDNTFVSGNCDVVIGIVNNTVYDPLQPELDSFKEELDKYFKNHTSPDVDLGDISGINASVVNIQKEIDRLNEVAKNLNESLIDLQELGKYEQYIKWPWYIWLGFIAGLIAIVMVTIMLCCMTSCCSCLKGCCSCGSCCKFDEDDSEPVLKGVKLHYT

SEQ ID NO: 43 - protein, 1273 aa, Artificial Sequence
  source: /note="Description of Artificial Sequence: Synthetic polypeptide"
MFVFLVLLPLVSSQCVNLTTRTQLPPAYTNSFTRGVYYPDKVFRSSVLHSTQDLFLPFFSNVTWFHAIHVSGTNGTKRFDNPVLPFNDGVYFASTEKSNIIRGWIFGTTLDSKTQSLLIVNNATNVVIKVCEFQFCNDPFLGVYYHKNNKSWMESEFRVYSSANNCTFEYVSQPFLMDLEGKQGNFKNLREFVFKNIDGYFKIYSKHTPINLVRDLPQGFSALEPLVDLPIGINITRFQTLLALHRSYLTPGDSSSGWTAGAAAYYVGYLQPRTFLLKYNENGTITDAVDCALDPLSETKCTLKSFTVEKGIYQTSNFRVQPTESIVRFPNITNLCPFGEVFNATRFASVYAWNRKRISNCVADYSVLYNSASFSTFKCYGVSPTKLNDLCFTNVYADSFVIRGDEVRQIAPGQTGKIADYNYKLPDDFTGCVIAWNSNNLDSKVGGNYNYLYRLFRKSNLKPFERDISTEIYQAGSTPCNGVEGFNCYFPLQSYGFQPTNGVGYQPYRVVVLSFELLHAPATVCGPKKSTNLVKNKCVNFNFNGLTGTGVLTESNKKFLPFQQFGRDIADTTDAVRDPQTLEILDITPCSFGGVSVITPGTNTSNQVAVLYQDVNCTEVPVAIHADQLTPTWRVYSTGSNVFQTRAGCLIGAEHVNNSYECDIPIGAGICASYQTQTNSPSRAGSVASQSIIAYTMSLGAENSVAYSNNSIAIPTNFTISVTTEILPVSMTKTSVDCTMYICGDSTECSNLLLQYGSFCTQLNRALTGIAVEQDKNTQEVFAQVKQIYKTPPIKDFGGFNFSQILPDPSKPSKRSFIEDLLFNKVTLADAGFIKQYGDCLGDIAARDLICAQKFNGLTVLPPLLTDEMIAQYTSALLAGTITSGWTFGAGAALQIPFAMQMAYRFNGIGVTQNVLYENQKLIANQFNSAIGKIQDSLSSGASALGKLQDVVNQNAQALNTLVKQLSSNFGAISSVLNDILSRLDPVEAEVQIDRLITGRLQSLQTYVTQQLIRAAEIRASANLAATKMSECVLGQSKRVDFCGKGYHLMSFPQSAPHGVVFLHVTYVPAQEKNFTTAPAICHDGKAHFPREGVFVSNGTHWFVTQRNFYEPQIITTDNTFVSGNCDVVIGIVNNTVYDPLQPELDSFKEELDKYFKNHTSPDVDLGDISGINASVVNIQKEIDRLNEVAKNLNESLIDLQELGKYEQYIKWPWYIWLGFIAGLIAIVMVTIMLCCMTSCCSCLKGCCSCGSCCKFDEDDSEPVLKGVKLHYT

SEQ ID NO: 44 - protein, 1273 aa, Artificial Sequence
  source: /note="Description of Artificial Sequence: Synthetic polypeptide"
MFVFLVLLPLVSSQCVNLTTRTQLPPAYTNSFTRGVYYPDKVFRSSVLHSTQDLFLPFFSNVTWFHAIHVSGTNGTKRFDNPVLPFNDGVYFASTEKSNIIRGWIFGTTLDSKTQSLLIVNNATNVVIKVCEFQFCNDPFLGVYYHKNNKSWMESEFRVYSSANNCTFEYVSQPFLMDLEGKQGNFKNLREFVFKNIDGYFKIYSKHTPINLVRDLPQGFSALEPLVDLPIGINITRFQTLLALHRSYLTPGDSSSGWTAGAAAYYVGYLQPRTFLLKYNENGTITDAVDCALDPLSETKCTLKSFTVEKGIYQTSNFRVQPTESIVRFPNITNLCPFGEVFNATRFASVYAWNRKRISNCVADYSVLYNSASFSTFKCYGVSPTKLNDLCFTNVYADSFVIRGDEVRQIAPGQTGKIADYNYKLPDDFTGCVIAWNSNNLDSKVGGNYNYLYRLFRKSNLKPFERDISTEIYQAGSTPCNGVEGFNCYFPLQSYGFQPTNGVGYQPYRVVVLSFELLHAPATVCGPKKSTNLVKNKCVNFNFNGLTGTGVLTESNKKFLPFQQFGRDIADTTDAVRDPQTLEILDITPCSFGGVSVITPGTNTSNQVAVLYQDVNCTEVPVAIHADQLTPTWRVYSTGSNVFQTRAGCLIGAEHVNNSYECDIPIGAGICASYQTQTNSPSRAGSVASQSIIAYTMSLGAENSVAYSNNSIAIPTNFTISVTTEILPVSMTKTSVDCTMYICGDSTECSNLLLQYGSFCTQLNRALTGIAVEQDKNTQEVFAQVKQIYKTPPIKDFGGFNFSQILPDPSKPSKRSFIEDLLFNKVTLADAGFIKQYGDCLGDIAARDLICAQKFNGLTVLPPLLTDEMIAQYTSALLAGTITSGWTFGAGAALQIPFAMQMAYRFNGIGVTQNVLYENQKLIANQFNSAIGKIQDSLSSTAGALGKLQDVVNQNAQALNTLVKQLSSNFGAISSVLNDILSRLDPVEAEVQIDRLITGRLQSLQTYVTQQLIRAAEIRASANLAATKMSECVLGQSKRVDFCGKGYHLMSFPQSAPHGVVFLHVTYVPAQEKNFTTAPAICHDGKAHFPREGVFVSNGTHWFVTQRNFYEPQIITTDNTFVSGNCDVVIGIVNNTVYDPLQPELDSFKEELDKYFKNHTSPDVDLGDISGINASVVNIQKEIDRLNEVAKNLNESLIDLQELGKYEQYIKWPWYIWLGFIAGLIAIVMVTIMLCCMTSCCSCLKGCCSCGSCCKFDEDDSEPVLKGVKLHYT

SEQ ID NO: 45 - protein, 1273 aa, Artificial Sequence
  source: /note="Description of Artificial Sequence: Synthetic polypeptide"
MFVFLVLLPLVSSQCVNLTTRTQLPPAYTNSFTRGVYYPDKVFRSSVLHSTQDLFLPFFSNVTWFHAIHVSGTNGTKRFDNPVLPFNDGVYFASTEKSNIIRGWIFGTTLDSKTQSLLIVNNATNVVIKVCEFQFCNDPFLGVYYHKNNKSWMESEFRVYSSANNCTFEYVSQPFLMDLEGKQGNFKNLREFVFKNIDGYFKIYSKHTPINLVRDLPQGFSALEPLVDLPIGINITRFQTLLALHRSYLTPGDSSSGWTAGAAAYYVGYLQPRTFLLKYNENGTITDAVDCALDPLSETKCTLKSFTVEKGIYQTSNFRVQPTESIVRFPNITNLCPFGEVFNATRFASVYAWNRKRISNCVADYSVLYNSASFSTFKCYGVSPTKLNDLCFTNVYADSFVIRGDEVRQIAPGQTGKIADYNYKLPDDFTGCVIAWNSNNLDSKVGGNYNYLYRLFRKSNLKPFERDISTEIYQAGSTPCNGVEGFNCYFPLQSYGFQPTNGVGYQPYRVVVLSFELLHAPATVCGPKKSTNLVKNKCVNFNFNGLTGTGVLTESNKKFLPFQQFGRDIADTTDAVRDPQTLEILDITPCSFGGVSVITPGTNTSNQVAVLYQNVNCTEVPVAIHADQLTPTWRVYSTGSNVFQTRAGCLIGAEHVNNSYECDIPIGAGICASYQTQTNSPSRAGSVASQSIIAYTMSLGAENSVAYSNNSIAIPTNFTISVTTEILPVSMTKTSVDCTMYICGDSTECSNLLLQYGSFCTQLNRALTGIAVEQDKNTQEVFAQVKQIYKTPPIKDFGGFNFSQILPDPSKPSKRSFIEDLLFNKVTLADAGFIKQYGDCLGDIAARDLICAQKFNGLTVLPPLLTDEMIAQYTSALLAGTITSGWTFGAGPALQIPFAMQMAYRFNGIGVTQNVLYENQKLIANQFNSAIGKIQDSLSSGPSALGKLQDVVNQNAQALNTLVKQLSSNFGAISSVLNDILSRLDPVEAEVQIDRLITGRLQSLQTYVTQQLIRAAEIRASANLAATKMSECVLGQSKRVDFCGKGYHLMSFPQSAPHGVVFLHVTYVPAQEKNFTTAPAICHDGKAHFPREGVFVSNGTHWFVTQRNFYEPQIITTDNTFVSGNCDVVIGIVNNTVYDPLQPELDSFKEELDKYFKNHTSPDVDLGDISGINASVVNIQKEIDRLNEVAKNLNESLIDLQELGKYEQYIKWPWYIWLGFIAGLIAIVMVTIMLCCMTSCCSCLKGCCSCGSCCKFDEDDSEPVLKGVKLHYT

SEQ ID NO: 46 - protein, 1273 aa, Artificial Sequence
  source: /note="Description of Artificial Sequence: Synthetic polypeptide"
MFVFLVLLPLVSSQCVNLTTRTQLPPAYTNSFTRGVYYPDKVFRSSVLHSTQDLFLPFFSNVTWFHAIHVSGTNGTKRFDNPVLPFNDGVYFASTEKSNIIRGWIFGTTLDSKTQSLLIVNNATNVVIKVCEFQFCNDPFLGVYYHKNNKSWMESEFRVYSSANNCTFEYVSQPFLMDLEGKQGNFKNLREFVFKNIDGYFKIYSKHTPINLVRDLPQGFSALEPLVDLPIGINITRFQTLLALHRSYLTPGDSSSGWTAGAAAYYVGYLQPRTFLLKYNENGTITDAVDCALDPLSETKCTLKSFTVEKGIYQTSNFRVQPTESIVRFPNITNLCPFGEVFNATRFASVYAWNRKRISNCVADYSVLYNSASFSTFKCYGVSPTKLNDLCFTNVYADSFVIRGDEVRQIAPGQTGKIADYNYKLPDDFTGCVIAWNSNNLDSKVGGNYNYLYRLFRKSNLKPFERDISTEIYQAGSTPCNGVEGFNCYFPLQSYGFQPTNGVGYQPYRVVVLSFELLHAPATVCGPKKSTNLVKNKCVNFNFNGLTGTGVLTESNKKFLPFQQFGRDIADTTDAVRDPQTLEILDITPCSFGGVSVITPGTNTSNQVAVLYQNVNCTEVPVAIHADQLTPTWRVYSTGSNVFQTRAGCLIGAEHVNNSYECDIPIGAGICASYQTQTNSPSRAGSVASQSIIAYTMSLGAENSVAYSNNSIAIPTNFTISVTTEILPVSMTKTSVDCTMYICGDSTECSNLLLQYGSFCTQLNRALTGIAVEQDKNTQEVFAQVKQIYKTPPIKDFGGFNFSQILPDPSKPSKRSFIEDLLFNKVTLADAGFIKQYGDCLGDIAARDLICAQKFNGLTVLPPLLTDEMIAQYTSALLAGTITSGWTFGAGPALQIPFAMQMAYRFNGIGVTQNVLYENQKLIANQFNSAIGKIQDSLSSTPGALGKLQDVVNQNAQALNTLVKQLSSNFGAISSVLNDILSRLDPVEAEVQIDRLITGRLQSLQTYVTQQLIRAAEIRASANLAATKMSECVLGQSKRVDFCGKGYHLMSFPQSAPHGVVFLHVTYVPAQEKNFTTAPAICHDGKAHFPREGVFVSNGTHWFVTQRNFYEPQIITTDNTFVSGNCDVVIGIVNNTVYDPLQPELDSFKEELDKYFKNHTSPDVDLGDISGINASVVNIQKEIDRLNEVAKNLNESLIDLQELGKYEQYIKWPWYIWLGFIAGLIAIVMVTIMLCCMTSCCSCLKGCCSCGSCCKFDEDDSEPVLKGVKLHYT

SEQ ID NO: 47 - protein, 1273 aa, Artificial Sequence
  source: /note="Description of Artificial Sequence: Synthetic polypeptide"
MFVFLVLLPLVSSQCVNLTTRTQLPPAYTNSFTRGVYYPDKVFRSSVLHSTQDLFLPFFSNVTWFHAIHVSGTNGTKRFDNPVLPFNDGVYFASTEKSNIIRGWIFGTTLDSKTQSLLIVNNATNVVIKVCEFQFCNDPFLGVYYHKNNKSWMESEFRVYSSANNCTFEYVSQPFLMDLEGKQGNFKNLREFVFKNIDGYFKIYSKHTPINLVRDLPQGFSALEPLVDLPIGINITRFQTLLALHRSYLTPGDSSSGWTAGAAAYYVGYLQPRTFLLKYNENGTITDAVDCALDPLSETKCTLKSFTVEKGIYQTSNFRVQPTESIVRFPNITNLCPFGEVFNATRFASVYAWNRKRISNCVADYSVLYNSASFSTFKCYGVSPTKLNDLCFTNVYADSFVIRGDEVRQIAPGQTGKIADYNYKLPDDFTGCVIAWNSNNLDSKVGGNYNYLYRLFRKSNLKPFERDISTEIYQAGSTPCNGVEGFNCYFPLQSYGFQPTNGVGYQPYRVVVLSFELLHAPATVCGPKKSTNLVKNKCVNFNFNGLTGTGVLTESNKKFLPFQQFGRDIADTTDAVRDPQTLEILDITPCSFGGVSVITPGTNTSNQVAVLYQNVNCTEVPVAIHADQLTPTWRVYSTGSNVFQTRAGCLIGAEHVNNSYECDIPIGAGICASYQTQTNSPSRAGSVASQSIIAYTMSLGAENSVAYSNNSIAIPTNFTISVTTEILPVSMTKTSVDCTMYICGDSTECSNLLLQYGSFCTQLNRALTGIAVEQDKNTQEVFAQVKQIYKTPPIKDFGGFNFSQILPDPSKPSKRSFIEDLLFNKVTLADAGFIKQYGDCLGDIAARDLICAQKFNGLTVLPPLLTDEMIAQYTSALLAGTITSGWTFGAGPALQIPFAMQMAYRFNGIGVTQNVLYENQKLIANQFNSAIGKIQDSLSSGPGALGKLQDVVNQNAQALNTLVKQLSSNFGAISSVLNDILSRLDPVEAEVQIDRLITGRLQSLQTYVTQQLIRAAEIRASANLAATKMSECVLGQSKRVDFCGKGYHLMSFPQSAPHGVVFLHVTYVPAQEKNFTTAPAICHDGKAHFPREGVFVSNGTHWFVTQRNFYEPQIITTDNTFVSGNCDVVIGIVNNTVYDPLQPELDSFKEELDKYFKNHTSPDVDLGDISGINASVVNIQKEIDRLNEVAKNLNESLIDLQELGKYEQYIKWPWYIWLGFIAGLIAIVMVTIMLCCMTSCCSCLKGCCSCGSCCKFDEDDSEPVLKGVKLHYT

SEQ ID NO: 48 - protein, 1273 aa, Artificial Sequence
  source: /note="Description of Artificial Sequence: Synthetic polypeptide"
MFVFLVLLPLVSSQCVNLTTRTQLPPAYTNSFTRGVYYPDKVFRSSVLHSTQDLFLPFFSNVTWFHAIHVSGTNGTKRFDNPVLPFNDGVYFASTEKSNIIRGWIFGTTLDSKTQSLLIVNNATNVVIKVCEFQFCNDPFLGVYYHKNNKSWMESEFRVYSSANNCTFEYVSQPFLMDLEGKQGNFKNLREFVFKNIDGYFKIYSKHTPINLVRDLPQGFSALEPLVDLPIGINITRFQTLLALHRSYLTPGDSSSGWTAGAAAYYVGYLQPRTFLLKYNENGTITDAVDCALDPLSETKCTLKSFTVEKGIYQTSNFRVQPTESIVRFPNITNLCPFGEVFNATRFASVYAWNRKRISNCVADYSVLYNSASFSTFKCYGVSPTKLNDLCFTNVYADSFVIRGDEVRQIAPGQTGKIADYNYKLPDDFTGCVIAWNSNNLDSKVGGNYNYLYRLFRKSNLKPFERDISTEIYQAGSTPCNGVEGFNCYFPLQSYGFQPTNGVGYQPYRVVVLSFELLHAPATVCGPKKSTNLVKNKCVNFNFNGLTGTGVLTESNKKFLPFQQFGRDIADTTDAVRDPQTLEILDITPCSFGGVSVITPGTNTSNQVAVLYQNVNCTEVPVAIHADQLTPTWRVYSTGSNVFQTRAGCLIGAEHVNNSYECDIPIGAGICASYQTQTNSPSRAGSVASQSIIAYTMSLGAENSVAYSNNSIAIPTNFTISVTTEILPVSMTKTSVDCTMYICGDSTECSNLLLQYGSFCTQLNRALTGIAVEQDKNTQEVFAQVKQIYKTPPIKDFGGFNFSQILPDPSKPSKRSFIEDLLFNKVTLADAGFIKQYGDCLGDIAARDLICAQKFNGLTVLPPLLTDEMIAQYTSALLAGTITSGWTFGAGPALQIPFAMQMAYRFNGIGVTQNVLYENQKLIANQFNSAIGKIQDSLSSGPSPLGKLQDVVNQNAQALNTLVKQLSSNFGAISSVLNDILSRLDPVEAEVQIDRLITGRLQSLQTYVTQQLIRAAEIRASANLAATKMSECVLGQSKRVDFCGKGYHLMSFPQSAPHGVVFLHVTYVPAQEKNFTTAPAICHDGKAHFPREGVFVSNGTHWFVTQRNFYEPQIITTDNTFVSGNCDVVIGIVNNTVYDPLQPELDSFKEELDKYFKNHTSPDVDLGDISGINASVVNIQKEIDRLNEVAKNLNESLIDLQELGKYEQYIKWPWYIWLGFIAGLIAIVMVTIMLCCMTSCCSCLKGCCSCGSCCKFDEDDSEPVLKGVKLHYT

SEQ ID NO: 49 - protein, 1273 aa, Artificial Sequence
  source: /note="Description of Artificial Sequence: Synthetic polypeptide"
MFVFLVLLPLVSSQCVNLTTRTQLPPAYTNSFTRGVYYPDKVFRSSVLHSTQDLFLPFFSNVTWFHAIHVSGTNGTKRFDNPVLPFNDGVYFASTEKSNIIRGWIFGTTLDSKTQSLLIVNNATNVVIKVCEFQFCNDPFLGVYYHKNNKSWMESEFRVYSSANNCTFEYVSQPFLMDLEGKQGNFKNLREFVFKNIDGYFKIYSKHTPINLVRDLPQGFSALEPLVDLPIGINITRFQTLLALHRSYLTPGDSSSGWTAGAAAYYVGYLQPRTFLLKYNENGTITDAVDCALDPLSETKCTLKSFTVEKGIYQTSNFRVQPTESIVRFPNITNLCPFGEVFNATRFASVYAWNRKRISNCVADYSVLYNSASFSTFKCYGVSPTKLNDLCFTNVYADSFVIRGDEVRQIAPGQTGKIADYNYKLPDDFTGCVIAWNSNNLDSKVGGNYNYLYRLFRKSNLKPFERDISTEIYQAGSTPCNGVEGFNCYFPLQSYGFQPTNGVGYQPYRVVVLSFELLHAPATVCGPKKSTNLVKNKCVNFNFNGLTGTGVLTESNKKFLPFQQFGRDIADTTDAVRDPQTLEILDITPCSFGGVSVITPGTNTSNQVAVLYQNVNCTEVPVAIHADQLTPTWRVYSTGSNVFQTRAGCLIGAEHVNNSYECDIPIGAGICASYQTQTNSPSRAGSVASQSIIAYTMSLGAENSVAYSNNSIAIPTNFTISVTTEILPVSMTKTSVDCTMYICGDSTECSNLLLQYGSFCTQLNRALTGIAVEQDKNTQEVFAQVKQIYKTPPIKDFGGFNFSQILPDPSKPSKRSFIEDLLFNKVTLADAGFIKQYGDCLGDIAARDLICAQKFNGLTVLPPLLTDEMIAQYTSALLAGTITSGWTFGAGPALQIPFAMQMAYRFNGIGVTQNVLYENQKLIANQFNSAIGKIQDSLSSTPGPLGKLQDVVNQNAQALNTLVKQLSSNFGAISSVLNDILSRLDPVEAEVQIDRLITGRLQSLQTYVTQQLIRAAEIRASANLAATKMSECVLGQSKRVDFCGKGYHLMSFPQSAPHGVVFLHVTYVPAQEKNFTTAPAICHDGKAHFPREGVFVSNGTHWFVTQRNFYEPQIITTDNTFVSGNCDVVIGIVNNTVYDPLQPELDSFKEELDKYFKNHTSPDVDLGDISGINASVVNIQKEIDRLNEVAKNLNESLIDLQELGKYEQYIKWPWYIWLGFIAGLIAIVMVTIMLCCMTSCCSCLKGCCSCGSCCKFDEDDSEPVLKGVKLHYT

SEQ ID NO: 50 - protein, 1273 aa, Artificial Sequence
  source: /note="Description of Artificial Sequence: Synthetic polypeptide"
MFVFLVLLPLVSSQCVNLTTRTQLPPAYTNSFTRGVYYPDKVFRSSVLHSTQDLFLPFFSNVTWFHAIHVSGTNGTKRFDNPVLPFNDGVYFASTEKSNIIRGWIFGTTLDSKTQSLLIVNNATNVVIKVCEFQFCNDPFLGVYYHKNNKSWMESEFRVYSSANNCTFEYVSQPFLMDLEGKQGNFKNLREFVFKNIDGYFKIYSKHTPINLVRDLPQGFSALEPLVDLPIGINITRFQTLLALHRSYLTPGDSSSGWTAGAAAYYVGYLQPRTFLLKYNENGTITDAVDCALDPLSETKCTLKSFTVEKGIYQTSNFRVQPTESIVRFPNITNLCPFGEVFNATRFASVYAWNRKRISNCVADYSVLYNSASFSTFKCYGVSPTKLNDLCFTNVYADSFVIRGDEVRQIAPGQTGKIADYNYKLPDDFTGCVIAWNSNNLDSKVGGNYNYLYRLFRKSNLKPFERDISTEIYQAGSTPCNGVEGFNCYFPLQSYGFQPTNGVGYQPYRVVVLSFELLHAPATVCGPKKSTNLVKNKCVNFNFNGLTGTGVLTESNKKFLPFQQFGRDIADTTDAVRDPQTLEILDITPCSFGGVSVITPGTNTSNQVAVLYQDVNCTEVPVAIHADQLTPTWRVYSTGSNVFQTRAGCLIGAEHVNNSYECDIPIGAGICASYQTQTNSPSRAGSVASQSIIAYTMSLGAENSVAYSNNSIAIPTNFTISVTTEILPVSMTKTSVDCTMYICGDSTECSNLLLQYGSFCTQLNRALTGIAVEQDKNTQEVFAQVKQIYKTPPIKDFGGFNFSQILPDPSKPSKRSFIEDLLFNKVTLADAGFIKQYGDCLGDIAARDLICAQKFNGLTVLPPLLTDEMIAQYTSALLAGTITSGWTFGAGAALQIPFAMQMAYRFNGIGVTQNVLYENQKLIANQFNSAIGKIQDSLSSGASALGKLQDVVNQNAQALNTLVKQLSSNFGAISSVLNDILSRLDKPEAEVQIDRLITGRLQSLQTYVTQQLIRAAEIRASANLAATKMSECVLGQSKRVDFCGKGYHLMSFPQSAPHGVVFLHVTYVPAQEKNFTTAPAICHDGKAHFPREGVFVSNGTHWFVTQRNFYEPQIITTDNTFVSGNCDVVIGIVNNTVYDPLQPELDSFKEELDKYFKNHTSPDVDLGDISGINASVVNIQKEIDRLNEVAKNLNESLIDLQELGKYEQYIKWPWYIWLGFIAGLIAIVMVTIMLCCMTSCCSCLKGCCSCGSCCKFDEDDSEPVLKGVKLHYT

SEQ ID NO: 51 - protein, 1273 aa, Artificial Sequence
  source: /note="Description of Artificial Sequence: Synthetic polypeptide"
MFVFLVLLPLVSSQCVNLTTRTQLPPAYTNSFTRGVYYPDKVFRSSVLHSTQDLFLPFFSNVTWFHAIHVSGTNGTKRFDNPVLPFNDGVYFASTEKSNIIRGWIFGTTLDSKTQSLLIVNNATNVVIKVCEFQFCNDPFLGVYYHKNNKSWMESEFRVYSSANNCTFEYVSQPFLMDLEGKQGNFKNLREFVFKNIDGYFKIYSKHTPINLVRDLPQGFSALEPLVDLPIGINITRFQTLLALHRSYLTPGDSSSGWTAGAAAYYVGYLQPRTFLLKYNENGTITDAVDCALDPLSETKCTLKSFTVEKGIYQTSNFRVQPTESIVRFPNITNLCPFGEVFNATRFASVYAWNRKRISNCVADYSVLYNSASFSTFKCYGVSPTKLNDLCFTNVYADSFVIRGDEVRQIAPGQTGKIADYNYKLPDDFTGCVIAWNSNNLDSKVGGNYNYLYRLFRKSNLKPFERDISTEIYQAGSTPCNGVEGFNCYFPLQSYGFQPTNGVGYQPYRVVVLSFELLHAPATVCGPKKSTNLVKNKCVNFNFNGLTGTGVLTESNKKFLPFQQFGRDIADTTDAVRDPQTLEILDITPCSFGGVSVITPGTNTSNQVAVLYQDVNCTEVPVAIHADQLTPTWRVYSTGSNVFQTRAGCLIGAEHVNNSYECDIPIGAGICASYQTQTNSPSRAGSVASQSIIAYTMSLGAENSVAYSNNSIAIPTNFTISVTTEILPVSMTKTSVDCTMYICGDSTECSNLLLQYGSFCTQLNRALTGIAVEQDKNTQEVFAQVKQIYKTPPIKDFGGFNFSQILPDPSKPSKRSFIEDLLFNKVTLADAGFIKQYGDCLGDIAARDLICAQKFNGLTVLPPLLTDEMIAQYTSALLAGTITSGWTFGAGAALQIPFAMQMAYRFNGIGVTQNVLYENQKLIANQFNSAIGKIQDSLSSTAGALGKLQDVVNQNAQALNTLVKQLSSNFGAISSVLNDILSRLDKPEAEVQIDRLITGRLQSLQTYVTQQLIRAAEIRASANLAATKMSECVLGQSKRVDFCGKGYHLMSFPQSAPHGVVFLHVTYVPAQEKNFTTAPAICHDGKAHFPREGVFVSNGTHWFVTQRNFYEPQIITTDNTFVSGNCDVVIGIVNNTVYDPLQPELDSFKEELDKYFKNHTSPDVDLGDISGINASVVNIQKEIDRLNEVAKNLNESLIDLQELGKYEQYIKWPWYIWLGFIAGLIAIVMVTIMLCCMTSCCSCLKGCCSCGSCCKFDEDDSEPVLKGVKLHYT

SEQ ID NO: 52 - protein, 1273 aa, Artificial Sequence
  source: /note="Description of Artificial Sequence: Synthetic polypeptide"
MFVFLVLLPLVSSQCVNLTTRTQLPPAYTNSFTRGVYYPDKVFRSSVLHSTQDLFLPFFSNVTWFHAIHVSGTNGTKRFDNPVLPFNDGVYFASTEKSNIIRGWIFGTTLDSKTQSLLIVNNATNVVIKVCEFQFCNDPFLGVYYHKNNKSWMESEFRVYSSANNCTFEYVSQPFLMDLEGKQGNFKNLREFVFKNIDGYFKIYSKHTPINLVRDLPQGFSALEPLVDLPIGINITRFQTLLALHRSYLTPGDSSSGWTAGAAAYYVGYLQPRTFLLKYNENGTITDAVDCALDPLSETKCTLKSFTVEKGIYQTSNFRVQPTESIVRFPNITNLCPFGEVFNATRFASVYAWNRKRISNCVADYSVLYNSASFSTFKCYGVSPTKLNDLCFTNVYADSFVIRGDEVRQIAPGQTGKIADYNYKLPDDFTGCVIAWNSNNLDSKVGGNYNYLYRLFRKSNLKPFERDISTEIYQAGSTPCNGVEGFNCYFPLQSYGFQPTNGVGYQPYRVVVLSFELLHAPATVCGPKKSTNLVKNKCVNFNFNGLTGTGVLTESNKKFLPFQQFGRDIADTTDAVRDPQTLEILDITPCSFGGVSVITPGTNTSNQVAVLYQNVNCTEVPVAIHADQLTPTWRVYSTGSNVFQTRAGCLIGAEHVNNSYECDIPIGAGICASYQTQTNSPSRAGSVASQSIIAYTMSLGAENSVAYSNNSIAIPTNFTISVTTEILPVSMTKTSVDCTMYICGDSTECSNLLLQYGSFCTQLNRALTGIAVEQDKNTQEVFAQVKQIYKTPPIKDFGGFNFSQILPDPSKPSKRSFIEDLLFNKVTLADAGFIKQYGDCLGDIAARDLICAQKFNGLTVLPPLLTDEMIAQYTSALLAGTITSGWTFGAGPALQIPFAMQMAYRFNGIGVTQNVLYENQKLIANQFNSAIGKIQDSLSSGPSALGKLQDVVNQNAQALNTLVKQLSSNFGAISSVLNDILSRLDKPEAEVQIDRLITGRLQSLQTYVTQQLIRAAEIRASANLAATKMSECVLGQSKRVDFCGKGYHLMSFPQSAPHGVVFLHVTYVPAQEKNFTTAPAICHDGKAHFPREGVFVSNGTHWFVTQRNFYEPQIITTDNTFVSGNCDVVIGIVNNTVYDPLQPELDSFKEELDKYFKNHTSPDVDLGDISGINASVVNIQKEIDRLNEVAKNLNESLIDLQELGKYEQYIKWPWYIWLGFIAGLIAIVMVTIMLCCMTSCCSCLKGCCSCGSCCKFDEDDSEPVLKGVKLHYT

SEQ ID NO: 53 - protein, 1273 aa, Artificial Sequence
  source: /note="Description of Artificial Sequence: Synthetic polypeptide"
MFVFLVLLPLVSSQCVNLTTRTQLPPAYTNSFTRGVYYPDKVFRSSVLHSTQDLFLPFFSNVTWFHAIHVSGTNGTKRFDNPVLPFNDGVYFASTEKSNIIRGWIFGTTLDSKTQSLLIVNNATNVVIKVCEFQFCNDPFLGVYYHKNNKSWMESEFRVYSSANNCTFEYVSQPFLMDLEGKQGNFKNLREFVFKNIDGYFKIYSKHTPINLVRDLPQGFSALEPLVDLPIGINITRFQTLLALHRSYLTPGDSSSGWTAGAAAYYVGYLQPRTFLLKYNENGTITDAVDCALDPLSETKCTLKSFTVEKGIYQTSNFRVQPTESIVRFPNITNLCPFGEVFNATRFASVYAWNRKRISNCVADYSVLYNSASFSTFKCYGVSPTKLNDLCFTNVYADSFVIRGDEVRQIAPGQTGKIADYNYKLPDDFTGCVIAWNSNNLDSKVGGNYNYLYRLFRKSNLKPFERDISTEIYQAGSTPCNGVEGFNCYFPLQSYGFQPTNGVGYQPYRVVVLSFELLHAPATVCGPKKSTNLVKNKCVNFNFNGLTGTGVLTESNKKFLPFQQFGRDIADTTDAVRDPQTLEILDITPCSFGGVSVITPGTNTSNQVAVLYQNVNCTEVPVAIHADQLTPTWRVYSTGSNVFQTRAGCLIGAEHVNNSYECDIPIGAGICASYQTQTNSPSRAGSVASQSIIAYTMSLGAENSVAYSNNSIAIPTNFTISVTTEILPVSMTKTSVDCTMYICGDSTECSNLLLQYGSFCTQLNRALTGIAVEQDKNTQEVFAQVKQIYKTPPIKDFGGFNFSQILPDPSKPSKRSFIEDLLFNKVTLADAGFIKQYGDCLGDIAARDLICAQKFNGLTVLPPLLTDEMIAQYTSALLAGTITSGWTFGAGPALQIPFAMQMAYRFNGIGVTQNVLYENQKLIANQFNSAIGKIQDSLSSTPGALGKLQDVVNQNAQALNTLVKQLSSNFGAISSVLNDILSRLDKPEAEVQIDRLITGRLQSLQTYVTQQLIRAAEIRASANLAATKMSECVLGQSKRVDFCGKGYHLMSFPQSAPHGVVFLHVTYVPAQEKNFTTAPAICHDGKAHFPREGVFVSNGTHWFVTQRNFYEPQIITTDNTFVSGNCDVVIGIVNNTVYDPLQPELDSFKEELDKYFKNHTSPDVDLGDISGINASVVNIQKEIDRLNEVAKNLNESLIDLQELGKYEQYIKWPWYIWLGFIAGLIAIVMVTIMLCCMTSCCSCLKGCCSCGSCCKFDEDDSEPVLKGVKLHYT

SEQ ID NO: 54 - protein, 1273 aa, Artificial Sequence
  source: /note="Description of Artificial Sequence: Synthetic polypeptide"
MFVFLVLLPLVSSQCVNLTTRTQLPPAYTNSFTRGVYYPDKVFRSSVLHSTQDLFLPFFSNVTWFHAIHVSGTNGTKRFDNPVLPFNDGVYFASTEKSNIIRGWIFGTTLDSKTQSLLIVNNATNVVIKVCEFQFCNDPFLGVYYHKNNKSWMESEFRVYSSANNCTFEYVSQPFLMDLEGKQGNFKNLREFVFKNIDGYFKIYSKHTPINLVRDLPQGFSALEPLVDLPIGINITRFQTLLALHRSYLTPGDSSSGWTAGAAAYYVGYLQPRTFLLKYNENGTITDAVDCALDPLSETKCTLKSFTVEKGIYQTSNFRVQPTESIVRFPNITNLCPFGEVFNATRFASVYAWNRKRISNCVADYSVLYNSASFSTFKCYGVSPTKLNDLCFTNVYADSFVIRGDEVRQIAPGQTGKIADYNYKLPDDFTGCVIAWNSNNLDSKVGGNYNYLYRLFRKSNLKPFERDISTEIYQAGSTPCNGVEGFNCYFPLQSYGFQPTNGVGYQPYRVVVLSFELLHAPATVCGPKKSTNLVKNKCVNFNFNGLTGTGVLTESNKKFLPFQQFGRDIADTTDAVRDPQTLEILDITPCSFGGVSVITPGTNTSNQVAVLYQNVNCTEVPVAIHADQLTPTWRVYSTGSNVFQTRAGCLIGAEHVNNSYECDIPIGAGICASYQTQTNSPSRAGSVASQSIIAYTMSLGAENSVAYSNNSIAIPTNFTISVTTEILPVSMTKTSVDCTMYICGDSTECSNLLLQYGSFCTQLNRALTGIAVEQDKNTQEVFAQVKQIYKTPPIKDFGGFNFSQILPDPSKPSKRSFIEDLLFNKVTLADAGFIKQYGDCLGDIAARDLICAQKFNGLTVLPPLLTDEMIAQYTSALLAGTITSGWTFGAGPALQIPFAMQMAYRFNGIGVTQNVLYENQKLIANQFNSAIGKIQDSLSSGPGALGKLQDVVNQNAQALNTLVKQLSSNFGAISSVLNDILSRLDKPEAEVQIDRLITGRLQSLQTYVTQQLIRAAEIRASANLAATKMSECVLGQSKRVDFCGKGYHLMSFPQSAPHGVVFLHVTYVPAQEKNFTTAPAICHDGKAHFPREGVFVSNGTHWFVTQRNFYEPQIITTDNTFVSGNCDVVIGIVNNTVYDPLQPELDSFKEELDKYFKNHTSPDVDLGDISGINASVVNIQKEIDRLNEVAKNLNESLIDLQELGKYEQYIKWPWYIWLGFIAGLIAIVMVTIMLCCMTSCCSCLKGCCSCGSCCKFDEDDSEPVLKGVKLHYT

SEQ ID NO: 55 - protein, 1273 aa, Artificial Sequence
  source: /note="Description of Artificial Sequence: Synthetic polypeptide"
MFVFLVLLPLVSSQCVNLTTRTQLPPAYTNSFTRGVYYPDKVFRSSVLHSTQDLFLPFFSNVTWFHAIHVSGTNGTKRFDNPVLPFNDGVYFASTEKSNIIRGWIFGTTLDSKTQSLLIVNNATNVVIKVCEFQFCNDPFLGVYYHKNNKSWMESEFRVYSSANNCTFEYVSQPFLMDLEGKQGNFKNLREFVFKNIDGYFKIYSKHTPINLVRDLPQGFSALEPLVDLPIGINITRFQTLLALHRSYLTPGDSSSGWTAGAAAYYVGYLQPRTFLLKYNENGTITDAVDCALDPLSETKCTLKSFTVEKGIYQTSNFRVQPTESIVRFPNITNLCPFGEVFNATRFASVYAWNRKRISNCVADYSVLYNSASFSTFKCYGVSPTKLNDLCFTNVYADSFVIRGDEVRQIAPGQTGKIADYNYKLPDDFTGCVIAWNSNNLDSKVGGNYNYLYRLFRKSNLKPFERDISTEIYQAGSTPCNGVEGFNCYFPLQSYGFQPTNGVGYQPYRVVVLSFELLHAPATVCGPKKSTNLVKNKCVNFNFNGLTGTGVLTESNKKFLPFQQFGRDIADTTDAVRDPQTLEILDITPCSFGGVSVITPGTNTSNQVAVLYQNVNCTEVPVAIHADQLTPTWRVYSTGSNVFQTRAGCLIGAEHVNNSYECDIPIGAGICASYQTQTNSPSRAGSVASQSIIAYTMSLGAENSVAYSNNSIAIPTNFTISVTTEILPVSMTKTSVDCTMYICGDSTECSNLLLQYGSFCTQLNRALTGIAVEQDKNTQEVFAQVKQIYKTPPIKDFGGFNFSQILPDPSKPSKRSFIEDLLFNKVTLADAGFIKQYGDCLGDIAARDLICAQKFNGLTVLPPLLTDEMIAQYTSALLAGTITSGWTFGAGPALQIPFAMQMAYRFNGIGVTQNVLYENQKLIANQFNSAIGKIQDSLSSGPSPLGKLQDVVNQNAQALNTLVKQLSSNFGAISSVLNDILSRLDKPEAEVQIDRLITGRLQSLQTYVTQQLIRAAEIRASANLAATKMSECVLGQSKRVDFCGKGYHLMSFPQSAPHGVVFLHVTYVPAQEKNFTTAPAICHDGKAHFPREGVFVSNGTHWFVTQRNFYEPQIITTDNTFVSGNCDVVIGIVNNTVYDPLQPELDSFKEELDKYFKNHTSPDVDLGDISGINASVVNIQKEIDRLNEVAKNLNESLIDLQELGKYEQYIKWPWYIWLGFIAGLIAIVMVTIMLCCMTSCCSCLKGCCSCGSCCKFDEDDSEPVLKGVKLHYT

SEQ ID NO: 56 - protein, 1273 aa, Artificial Sequence
  source: /note="Description of Artificial Sequence: Synthetic polypeptide"
MFVFLVLLPLVSSQCVNLTTRTQLPPAYTNSFTRGVYYPDKVFRSSVLHSTQDLFLPFFSNVTWFHAIHVSGTNGTKRFDNPVLPFNDGVYFASTEKSNIIRGWIFGTTLDSKTQSLLIVNNATNVVIKVCEFQFCNDPFLGVYYHKNNKSWMESEFRVYSSANNCTFEYVSQPFLMDLEGKQGNFKNLREFVFKNIDGYFKIYSKHTPINLVRDLPQGFSALEPLVDLPIGINITRFQTLLALHRSYLTPGDSSSGWTAGAAAYYVGYLQPRTFLLKYNENGTITDAVDCALDPLSETKCTLKSFTVEKGIYQTSNFRVQPTESIVRFPNITNLCPFGEVFNATRFASVYAWNRKRISNCVADYSVLYNSASFSTFKCYGVSPTKLNDLCFTNVYADSFVIRGDEVRQIAPGQTGKIADYNYKLPDDFTGCVIAWNSNNLDSKVGGNYNYLYRLFRKSNLKPFERDISTEIYQAGSTPCNGVEGFNCYFPLQSYGFQPTNGVGYQPYRVVVLSFELLHAPATVCGPKKSTNLVKNKCVNFNFNGLTGTGVLTESNKKFLPFQQFGRDIADTTDAVRDPQTLEILDITPCSFGGVSVITPGTNTSNQVAVLYQNVNCTEVPVAIHADQLTPTWRVYSTGSNVFQTRAGCLIGAEHVNNSYECDIPIGAGICASYQTQTNSPSRAGSVASQSIIAYTMSLGAENSVAYSNNSIAIPTNFTISVTTEILPVSMTKTSVDCTMYICGDSTECSNLLLQYGSFCTQLNRALTGIAVEQDKNTQEVFAQVKQIYKTPPIKDFGGFNFSQILPDPSKPSKRSFIEDLLFNKVTLADAGFIKQYGDCLGDIAARDLICAQKFNGLTVLPPLLTDEMIAQYTSALLAGTITSGWTFGAGPALQIPFAMQMAYRFNGIGVTQNVLYENQKLIANQFNSAIGKIQDSLSSTPGPLGKLQDVVNQNAQALNTLVKQLSSNFGAISSVLNDILSRLDKPEAEVQIDRLITGRLQSLQTYVTQQLIRAAEIRASANLAATKMSECVLGQSKRVDFCGKGYHLMSFPQSAPHGVVFLHVTYVPAQEKNFTTAPAICHDGKAHFPREGVFVSNGTHWFVTQRNFYEPQIITTDNTFVSGNCDVVIGIVNNTVYDPLQPELDSFKEELDKYFKNHTSPDVDLGDISGINASVVNIQKEIDRLNEVAKNLNESLIDLQELGKYEQYIKWPWYIWLGFIAGLIAIVMVTIMLCCMTSCCSCLKGCCSCGSCCKFDEDDSEPVLKGVKLHYT

SEQ ID NO: 57 - protein, 1273 aa, Artificial Sequence
  source: /note="Description of Artificial Sequence: Synthetic polypeptide"
MFVFLVLLPLVSSQCVNLTTRTQLPPAYTNSFTRGVYYPDKVFRSSVLHSTQDLFLPFFSNVTWFHAIHVSGTNGTKRFDNPVLPFNDGVYFASTEKSNIIRGWIFGTTLDSKTQSLLIVNNATNVVIKVCEFQFCNDPFLGVYYHKNNKSWMESEFRVYSSANNCTFEYVSQPFLMDLEGKQGNFKNLREFVFKNIDGYFKIYSKHTPINLVRDLPQGFSALEPLVDLPIGINITRFQTLLALHRSYLTPGDSSSGWTAGAAAYYVGYLQPRTFLLKYNENGTITDAVDCALDPLSETKCTLKSFTVEKGIYQTSNFRVQPTESIVRFPNITNLCPFGEVFNATRFASVYAWNRKRISNCVADYSVLYNSASFSTFKCYGVSPTKLNDLCFTNVYADSFVIRGDEVRQIAPGQTGKIADYNYKLPDDFTGCVIAWNSNNLDSKVGGNYNYLYRLFRKSNLKPFERDISTEIYQAGSTPCNGVEGFNCYFPLQSYGFQPTNGVGYQPYRVVVLSFELLHAPATVCGPKKSTNLVKNKCVNFNFNGLTGTGVLTESNKKFLPFQQFGRDIADTTDAVRDPQTLEILDITPCSFGGVSVITPGTNTSNQVAVLYQDVNCTEVPVAIHADQLTPTWRVYSTGSNVFQTRAGCLIGAEHVNNSYECDIPIGAGICASYQTQTNSPSRAGSVASQSIIAYTMSLGAENSVAYSNNSIAIPTNFTISVTTEILPVSMTKTSVDCTMYICGDSTECSNLLLQYGSFCTQLNRALTGIAVEQDKNTQEVFAQVKQIYKTPPIKDFGGFNFSQILPDPSKPSKRSFIEDLLFNKVTLADAGFIKQYGDCLGDIAARDLICAQKFNGLTVLPPLLTDEMIAQYTSALLAGTITSGWTFGAGAALQIPFAMQMAYRFNGIGVTQNVLYENQKLIANQFNSAIGKIQDSLSSGASALGKLQDVVNQNAQALNTLVKQLSSNFGAISSVLNDILSRLDPPEAEVQIDRLITGRLQSLQTYVTQQLIRAAEIRASANLAATKMSECVLGQSKRVDFCGKGYHLMSFPQSAPHGVVFLHVTYVPAQEKNFTTAPAICHDGKAHFPREGVFVSNGTHWFVTQRNFYEPQIITTDNTFVSGNCDVVIGIVNNTVYDPLQPELDSFKEELDKYFKNHTSPDVDLGDISGINASVVNIQKEIDRLNEVAKNLNESLIDLQELGKYEQYIKWPWYIWLGFIAGLIAIVMVTIMLCCMTSCCSCLKGCCSCGSCCKFDEDDSEPVLKGVKLHYT

SEQ ID NO: 58 - protein, 1273 aa, Artificial Sequence
  source: /note="Description of Artificial Sequence: Synthetic polypeptide"
MFVFLVLLPLVSSQCVNLTTRTQLPPAYTNSFTRGVYYPDKVFRSSVLHSTQDLFLPFFSNVTWFHAIHVSGTNGTKRFDNPVLPFNDGVYFASTEKSNIIRGWIFGTTLDSKTQSLLIVNNATNVVIKVCEFQFCNDPFLGVYYHKNNKSWMESEFRVYSSANNCTFEYVSQPFLMDLEGKQGNFKNLREFVFKNIDGYFKIYSKHTPINLVRDLPQGFSALEPLVDLPIGINITRFQTLLALHRSYLTPGDSSSGWTAGAAAYYVGYLQPRTFLLKYNENGTITDAVDCALDPLSETKCTLKSFTVEKGIYQTSNFRVQPTESIVRFPNITNLCPFGEVFNATRFASVYAWNRKRISNCVADYSVLYNSASFSTFKCYGVSPTKLNDLCFTNVYADSFVIRGDEVRQIAPGQTGKIADYNYKLPDDFTGCVIAWNSNNLDSKVGGNYNYLYRLFRKSNLKPFERDISTEIYQAGSTPCNGVEGFNCYFPLQSYGFQPTNGVGYQPYRVVVLSFELLHAPATVCGPKKSTNLVKNKCVNFNFNGLTGTGVLTESNKKFLPFQQFGRDIADTTDAVRDPQTLEILDITPCSFGGVSVITPGTNTSNQVAVLYQDVNCTEVPVAIHADQLTPTWRVYSTGSNVFQTRAGCLIGAEHVNNSYECDIPIGAGICASYQTQTNSPSRAGSVASQSIIAYTMSLGAENSVAYSNNSIAIPTNFTISVTTEILPVSMTKTSVDCTMYICGDSTECSNLLLQYGSFCTQLNRALTGIAVEQDKNTQEVFAQVKQIYKTPPIKDFGGFNFSQILPDPSKPSKRSFIEDLLFNKVTLADAGFIKQYGDCLGDIAARDLICAQKFNGLTVLPPLLTDEMIAQYTSALLAGTITSGWTFGAGAALQIPFAMQMAYRFNGIGVTQNVLYENQKLIANQFNSAIGKIQDSLSSTAGALGKLQDVVNQNAQALNTLVKQLSSNFGAISSVLNDILSRLDPPEAEVQIDRLITGRLQSLQTYVTQQLIRAAEIRASANLAATKMSECVLGQSKRVDFCGKGYHLMSFPQSAPHGVVFLHVTYVPAQEKNFTTAPAICHDGKAHFPREGVFVSNGTHWFVTQRNFYEPQIITTDNTFVSGNCDVVIGIVNNTVYDPLQPELDSFKEELDKYFKNHTSPDVDLGDISGINASVVNIQKEIDRLNEVAKNLNESLIDLQELGKYEQYIKWPWYIWLGFIAGLIAIVMVTIMLCCMTSCCSCLKGCCSCGSCCKFDEDDSEPVLKGVKLHYT

SEQ ID NO: 59 - protein, 1273 aa, Artificial Sequence
  source: /note="Description of Artificial Sequence: Synthetic polypeptide"
MFVFLVLLPLVSSQCVNLTTRTQLPPAYTNSFTRGVYYPDKVFRSSVLHSTQDLFLPFFSNVTWFHAIHVSGTNGTKRFDNPVLPFNDGVYFASTEKSNIIRGWIFGTTLDSKTQSLLIVNNATNVVIKVCEFQFCNDPFLGVYYHKNNKSWMESEFRVYSSANNCTFEYVSQPFLMDLEGKQGNFKNLREFVFKNIDGYFKIYSKHTPINLVRDLPQGFSALEPLVDLPIGINITRFQTLLALHRSYLTPGDSSSGWTAGAAAYYVGYLQPRTFLLKYNENGTITDAVDCALDPLSETKCTLKSFTVEKGIYQTSNFRVQPTESIVRFPNITNLCPFGEVFNATRFASVYAWNRKRISNCVADYSVLYNSASFSTFKCYGVSPTKLNDLCFTNVYADSFVIRGDEVRQIAPGQTGKIADYNYKLPDDFTGCVIAWNSNNLDSKVGGNYNYLYRLFRKSNLKPFERDISTEIYQAGSTPCNGVEGFNCYFPLQSYGFQPTNGVGYQPYRVVVLSFELLHAPATVCGPKKSTNLVKNKCVNFNFNGLTGTGVLTESNKKFLPFQQFGRDIADTTDAVRDPQTLEILDITPCSFGGVSVITPGTNTSNQVAVLYQNVNCTEVPVAIHADQLTPTWRVYSTGSNVFQTRAGCLIGAEHVNNSYECDIPIGAGICASYQTQTNSPSRAGSVASQSIIAYTMSLGAENSVAYSNNSIAIPTNFTISVTTEILPVSMTKTSVDCTMYICGDSTECSNLLLQYGSFCTQLNRALTGIAVEQDKNTQEVFAQVKQIYKTPPIKDFGGFNFSQILPDPSKPSKRSFIEDLLFNKVTLADAGFIKQYGDCLGDIAARDLICAQKFNGLTVLPPLLTDEMIAQYTSALLAGTITSGWTFGAGPALQIPFAMQMAYRFNGIGVTQNVLYENQKLIANQFNSAIGKIQDSLSSGPSALGKLQDVVNQNAQALNTLVKQLSSNFGAISSVLNDILSRLDPPEAEVQIDRLITGRLQSLQTYVTQQLIRAAEIRASANLAATKMSECVLGQSKRVDFCGKGYHLMSFPQSAPHGVVFLHVTYVPAQEKNFTTAPAICHDGKAHFPREGVFVSNGTHWFVTQRNFYEPQIITTDNTFVSGNCDVVIGIVNNTVYDPLQPELDSFKEELDKYFKNHTSPDVDLGDISGINASVVNIQKEIDRLNEVAKNLNESLIDLQELGKYEQYIKWPWYIWLGFIAGLIAIVMVTIMLCCMTSCCSCLKGCCSCGSCCKFDEDDSEPVLKGVKLHYT

SEQ ID NO: 60 - protein, 1273 aa, Artificial Sequence
  source: /note="Description of Artificial Sequence: Synthetic polypeptide"
MFVFLVLLPLVSSQCVNLTTRTQLPPAYTNSFTRGVYYPDKVFRSSVLHSTQDLFLPFFSNVTWFHAIHVSGTNGTKRFDNPVLPFNDGVYFASTEKSNIIRGWIFGTTLDSKTQSLLIVNNATNVVIKVCEFQFCNDPFLGVYYHKNNKSWMESEFRVYSSANNCTFEYVSQPFLMDLEGKQGNFKNLREFVFKNIDGYFKIYSKHTPINLVRDLPQGFSALEPLVDLPIGINITRFQTLLALHRSYLTPGDSSSGWTAGAAAYYVGYLQPRTFLLKYNENGTITDAVDCALDPLSETKCTLKSFTVEKGIYQTSNFRVQPTESIVRFPNITNLCPFGEVFNATRFASVYAWNRKRISNCVADYSVLYNSASFSTFKCYGVSPTKLNDLCFTNVYADSFVIRGDEVRQIAPGQTGKIADYNYKLPDDFTGCVIAWNSNNLDSKVGGNYNYLYRLFRKSNLKPFERDISTEIYQAGSTPCNGVEGFNCYFPLQSYGFQPTNGVGYQPYRVVVLSFELLHAPATVCGPKKSTNLVKNKCVNFNFNGLTGTGVLTESNKKFLPFQQFGRDIADTTDAVRDPQTLEILDITPCSFGGVSVITPGTNTSNQVAVLYQNVNCTEVPVAIHADQLTPTWRVYSTGSNVFQTRAGCLIGAEHVNNSYECDIPIGAGICASYQTQTNSPSRAGSVASQSIIAYTMSLGAENSVAYSNNSIAIPTNFTISVTTEILPVSMTKTSVDCTMYICGDSTECSNLLLQYGSFCTQLNRALTGIAVEQDKNTQEVFAQVKQIYKTPPIKDFGGFNFSQILPDPSKPSKRSFIEDLLFNKVTLADAGFIKQYGDCLGDIAARDLICAQKFNGLTVLPPLLTDEMIAQYTSALLAGTITSGWTFGAGPALQIPFAMQMAYRFNGIGVTQNVLYENQKLIANQFNSAIGKIQDSLSSTPGALGKLQDVVNQNAQALNTLVKQLSSNFGAISSVLNDILSRLDPPEAEVQIDRLITGRLQSLQTYVTQQLIRAAEIRASANLAATKMSECVLGQSKRVDFCGKGYHLMSFPQSAPHGVVFLHVTYVPAQEKNFTTAPAICHDGKAHFPREGVFVSNGTHWFVTQRNFYEPQIITTDNTFVSGNCDVVIGIVNNTVYDPLQPELDSFKEELDKYFKNHTSPDVDLGDISGINASVVNIQKEIDRLNEVAKNLNESLIDLQELGKYEQYIKWPWYIWLGFIAGLIAIVMVTIMLCCMTSCCSCLKGCCSCGSCCKFDEDDSEPVLKGVKLHYT

SEQ ID NO: 61 - protein, 1273 aa, Artificial Sequence
  source: /note="Description of Artificial Sequence: Synthetic polypeptide"
MFVFLVLLPLVSSQCVNLTTRTQLPPAYTNSFTRGVYYPDKVFRSSVLHSTQDLFLPFFSNVTWFHAIHVSGTNGTKRFDNPVLPFNDGVYFASTEKSNIIRGWIFGTTLDSKTQSLLIVNNATNVVIKVCEFQFCNDPFLGVYYHKNNKSWMESEFRVYSSANNCTFEYVSQPFLMDLEGKQGNFKNLREFVFKNIDGYFKIYSKHTPINLVRDLPQGFSALEPLVDLPIGINITRFQTLLALHRSYLTPGDSSSGWTAGAAAYYVGYLQPRTFLLKYNENGTITDAVDCALDPLSETKCTLKSFTVEKGIYQTSNFRVQPTESIVRFPNITNLCPFGEVFNATRFASVYAWNRKRISNCVADYSVLYNSASFSTFKCYGVSPTKLNDLCFTNVYADSFVIRGDEVRQIAPGQTGKIADYNYKLPDDFTGCVIAWNSNNLDSKVGGNYNYLYRLFRKSNLKPFERDISTEIYQAGSTPCNGVEGFNCYFPLQSYGFQPTNGVGYQPYRVVVLSFELLHAPATVCGPKKSTNLVKNKCVNFNFNGLTGTGVLTESNKKFLPFQQFGRDIADTTDAVRDPQTLEILDITPCSFGGVSVITPGTNTSNQVAVLYQNVNCTEVPVAIHADQLTPTWRVYSTGSNVFQTRAGCLIGAEHVNNSYECDIPIGAGICASYQTQTNSPSRAGSVASQSIIAYTMSLGAENSVAYSNNSIAIPTNFTISVTTEILPVSMTKTSVDCTMYICGDSTECSNLLLQYGSFCTQLNRALTGIAVEQDKNTQEVFAQVKQIYKTPPIKDFGGFNFSQILPDPSKPSKRSFIEDLLFNKVTLADAGFIKQYGDCLGDIAARDLICAQKFNGLTVLPPLLTDEMIAQYTSALLAGTITSGWTFGAGPALQIPFAMQMAYRFNGIGVTQNVLYENQKLIANQFNSAIGKIQDSLSSGPGALGKLQDVVNQNAQALNTLVKQLSSNFGAISSVLNDILSRLDPPEAEVQIDRLITGRLQSLQTYVTQQLIRAAEIRASANLAATKMSECVLGQSKRVDFCGKGYHLMSFPQSAPHGVVFLHVTYVPAQEKNFTTAPAICHDGKAHFPREGVFVSNGTHWFVTQRNFYEPQIITTDNTFVSGNCDVVIGIVNNTVYDPLQPELDSFKEELDKYFKNHTSPDVDLGDISGINASVVNIQKEIDRLNEVAKNLNESLIDLQELGKYEQYIKWPWYIWLGFIAGLIAIVMVTIMLCCMTSCCSCLKGCCSCGSCCKFDEDDSEPVLKGVKLHYT

SEQ ID NO: 62 - protein, 1273 aa, Artificial Sequence
  source: /note="Description of Artificial Sequence: Synthetic polypeptide"
MFVFLVLLPLVSSQCVNLTTRTQLPPAYTNSFTRGVYYPDKVFRSSVLHSTQDLFLPFFSNVTWFHAIHVSGTNGTKRFDNPVLPFNDGVYFASTEKSNIIRGWIFGTTLDSKTQSLLIVNNATNVVIKVCEFQFCNDPFLGVYYHKNNKSWMESEFRVYSSANNCTFEYVSQPFLMDLEGKQGNFKNLREFVFKNIDGYFKIYSKHTPINLVRDLPQGFSALEPLVDLPIGINITRFQTLLALHRSYLTPGDSSSGWTAGAAAYYVGYLQPRTFLLKYNENGTITDAVDCALDPLSETKCTLKSFTVEKGIYQTSNFRVQPTESIVRFPNITNLCPFGEVFNATRFASVYAWNRKRISNCVADYSVLYNSASFSTFKCYGVSPTKLNDLCFTNVYADSFVIRGDEVRQIAPGQTGKIADYNYKLPDDFTGCVIAWNSNNLDSKVGGNYNYLYRLFRKSNLKPFERDISTEIYQAGSTPCNGVEGFNCYFPLQSYGFQPTNGVGYQPYRVVVLSFELLHAPATVCGPKKSTNLVKNKCVNFNFNGLTGTGVLTESNKKFLPFQQFGRDIADTTDAVRDPQTLEILDITPCSFGGVSVITPGTNTSNQVAVLYQNVNCTEVPVAIHADQLTPTWRVYSTGSNVFQTRAGCLIGAEHVNNSYECDIPIGAGICASYQTQTNSPSRAGSVASQSIIAYTMSLGAENSVAYSNNSIAIPTNFTISVTTEILPVSMTKTSVDCTMYICGDSTECSNLLLQYGSFCTQLNRALTGIAVEQDKNTQEVFAQVKQIYKTPPIKDFGGFNFSQILPDPSKPSKRSFIEDLLFNKVTLADAGFIKQYGDCLGDIAARDLICAQKFNGLTVLPPLLTDEMIAQYTSALLAGTITSGWTFGAGPALQIPFAMQMAYRFNGIGVTQNVLYENQKLIANQFNSAIGKIQDSLSSGPSPLGKLQDVVNQNAQALNTLVKQLSSNFGAISSVLNDILSRLDPPEAEVQIDRLITGRLQSLQTYVTQQLIRAAEIRASANLAATKMSECVLGQSKRVDFCGKGYHLMSFPQSAPHGVVFLHVTYVPAQEKNFTTAPAICHDGKAHFPREGVFVSNGTHWFVTQRNFYEPQIITTDNTFVSGNCDVVIGIVNNTVYDPLQPELDSFKEELDKYFKNHTSPDVDLGDISGINASVVNIQKEIDRLNEVAKNLNESLIDLQELGKYEQYIKWPWYIWLGFIAGLIAIVMVTIMLCCMTSCCSCLKGCCSCGSCCKFDEDDSEPVLKGVKLHYT

SEQ ID NO: 63 - protein, 1273 aa, Artificial Sequence
  source: /note="Description of Artificial Sequence: Synthetic polypeptide"
MFVFLVLLPLVSSQCVNLTTRTQLPPAYTNSFTRGVYYPDKVFRSSVLHSTQDLFLPFFSNVTWFHAIHVSGTNGTKRFDNPVLPFNDGVYFASTEKSNIIRGWIFGTTLDSKTQSLLIVNNATNVVIKVCEFQFCNDPFLGVYYHKNNKSWMESEFRVYSSANNCTFEYVSQPFLMDLEGKQGNFKNLREFVFKNIDGYFKIYSKHTPINLVRDLPQGFSALEPLVDLPIGINITRFQTLLALHRSYLTPGDSSSGWTAGAAAYYVGYLQPRTFLLKYNENGTITDAVDCALDPLSETKCTLKSFTVEKGIYQTSNFRVQPTESIVRFPNITNLCPFGEVFNATRFASVYAWNRKRISNCVADYSVLYNSASFSTFKCYGVSPTKLNDLCFTNVYADSFVIRGDEVRQIAPGQTGKIADYNYKLPDDFTGCVIAWNSNNLDSKVGGNYNYLYRLFRKSNLKPFERDISTEIYQAGSTPCNGVEGFNCYFPLQSYGFQPTNGVGYQPYRVVVLSFELLHAPATVCGPKKSTNLVKNKCVNFNFNGLTGTGVLTESNKKFLPFQQFGRDIADTTDAVRDPQTLEILDITPCSFGGVSVITPGTNTSNQVAVLYQNVNCTEVPVAIHADQLTPTWRVYSTGSNVFQTRAGCLIGAEHVNNSYECDIPIGAGICASYQTQTNSPSRAGSVASQSIIAYTMSLGAENSVAYSNNSIAIPTNFTISVTTEILPVSMTKTSVDCTMYICGDSTECSNLLLQYGSFCTQLNRALTGIAVEQDKNTQEVFAQVKQIYKTPPIKDFGGFNFSQILPDPSKPSKRSFIEDLLFNKVTLADAGFIKQYGDCLGDIAARDLICAQKFNGLTVLPPLLTDEMIAQYTSALLAGTITSGWTFGAGPALQIPFAMQMAYRFNGIGVTQNVLYENQKLIANQFNSAIGKIQDSLSSTPGPLGKLQDVVNQNAQALNTLVKQLSSNFGAISSVLNDILSRLDPPEAEVQIDRLITGRLQSLQTYVTQQLIRAAEIRASANLAATKMSECVLGQSKRVDFCGKGYHLMSFPQSAPHGVVFLHVTYVPAQEKNFTTAPAICHDGKAHFPREGVFVSNGTHWFVTQRNFYEPQIITTDNTFVSGNCDVVIGIVNNTVYDPLQPELDSFKEELDKYFKNHTSPDVDLGDISGINASVVNIQKEIDRLNEVAKNLNESLIDLQELGKYEQYIKWPWYIWLGFIAGLIAIVMVTIMLCCMTSCCSCLKGCCSCGSCCKFDEDDSEPVLKGVKLHYT

SEQ ID NO: 64 - protein, 1208 aa, Artificial Sequence
  source: /note="Description of Artificial Sequence: Synthetic polypeptide"
MFVFLVLLPLVSSQCVNLTTRTQLPPAYTNSFTRGVYYPDKVFRSSVLHSTQDLFLPFFSNVTWFHAIHVSGTNGTKRFDNPVLPFNDGVYFASTEKSNIIRGWIFGTTLDSKTQSLLIVNNATNVVIKVCEFQFCNDPFLGVYYHKNNKSWMESEFRVYSSANNCTFEYVSQPFLMDLEGKQGNFKNLREFVFKNIDGYFKIYSKHTPINLVRDLPQGFSALEPLVDLPIGINITRFQTLLALHRSYLTPGDSSSGWTAGAAAYYVGYLQPRTFLLKYNENGTITDAVDCALDPLSETKCTLKSFTVEKGIYQTSNFRVQPTESIVRFPNITNLCPFGEVFNATRFASVYAWNRKRISNCVADYSVLYNSASFSTFKCYGVSPTKLNDLCFTNVYADSFVIRGDEVRQIAPGQTGKIADYNYKLPDDFTGCVIAWNSNNLDSKVGGNYNYLYRLFRKSNLKPFERDISTEIYQAGSTPCNGVEGFNCYFPLQSYGFQPTNGVGYQPYRVVVLSFELLHAPATVCGPKKSTNLVKNKCVNFNFNGLTGTGVLTESNKKFLPFQQFGRDIADTTDAVRDPQTLEILDITPCSFGGVSVITPGTNTSNQVAVLYQDVNCTEVPVAIHADQLTPTWRVYSTGSNVFQTRAGCLIGAEHVNNSYECDIPIGAGICASYQTQTNSPRRARSVASQSIIAYTMSLGAENSVAYSNNSIAIPTNFTISVTTEILPVSMTKTSVDCTMYICGDSTECSNLLLQYGSFCTQLNRALTGIAVEQDKNTQEVFAQVKQIYKTPPIKDFGGFNFSQILPDPSKPSKRSFIEDLLFNKVTLADAGFIKQYGDCLGDIAARDLICAQKFNGLTVLPPLLTDEMIAQYTSALLAGTITSGWTFGAGAALQIPFAMQMAYRFNGIGVTQNVLYENQKLIANQFNSAIGKIQDSLSSGASALGKLQDVVNQNAQALNTLVKQLSSNFGAISSVLNDILSRLDKVEAEVQIDRLITGRLQSLQTYVTQQLIRAAEIRASANLAATKMSECVLGQSKRVDFCGKGYHLMSFPQSAPHGVVFLHVTYVPAQEKNFTTAPAICHDGKAHFPREGVFVSNGTHWFVTQRNFYEPQIITTDNTFVSGNCDVVIGIVNNTVYDPLQPELDSFKEELDKYFKNHTSPDVDLGDISGINASVVNIQKEIDRLNEVAKNLNESLIDLQELGKYEQ

SEQ ID NO: 65 - protein, 1208 aa, Artificial Sequence
  source: /note="Description of Artificial Sequence: Synthetic polypeptide"
MFVFLVLLPLVSSQCVNLTTRTQLPPAYTNSFTRGVYYPDKVFRSSVLHSTQDLFLPFFSNVTWFHAIHVSGTNGTKRFDNPVLPFNDGVYFASTEKSNIIRGWIFGTTLDSKTQSLLIVNNATNVVIKVCEFQFCNDPFLGVYYHKNNKSWMESEFRVYSSANNCTFEYVSQPFLMDLEGKQGNFKNLREFVFKNIDGYFKIYSKHTPINLVRDLPQGFSALEPLVDLPIGINITRFQTLLALHRSYLTPGDSSSGWTAGAAAYYVGYLQPRTFLLKYNENGTITDAVDCALDPLSETKCTLKSFTVEKGIYQTSNFRVQPTESIVRFPNITNLCPFGEVFNATRFASVYAWNRKRISNCVADYSVLYNSASFSTFKCYGVSPTKLNDLCFTNVYADSFVIRGDEVRQIAPGQTGKIADYNYKLPDDFTGCVIAWNSNNLDSKVGGNYNYLYRLFRKSNLKPFERDISTEIYQAGSTPCNGVEGFNCYFPLQSYGFQPTNGVGYQPYRVVVLSFELLHAPATVCGPKKSTNLVKNKCVNFNFNGLTGTGVLTESNKKFLPFQQFGRDIADTTDAVRDPQTLEILDITPCSFGGVSVITPGTNTSNQVAVLYQDVNCTEVPVAIHADQLTPTWRVYSTGSNVFQTRAGCLIGAEHVNNSYECDIPIGAGICASYQTQTNSPRRARSVASQSIIAYTMSLGAENSVAYSNNSIAIPTNFTISVTTEILPVSMTKTSVDCTMYICGDSTECSNLLLQYGSFCTQLNRALTGIAVEQDKNTQEVFAQVKQIYKTPPIKDFGGFNFSQILPDPSKPSKRSFIEDLLFNKVTLADAGFIKQYGDCLGDIAARDLICAQKFNGLTVLPPLLTDEMIAQYTSALLAGTITSGWTFGAGAALQIPFAMQMAYRFNGIGVTQNVLYENQKLIANQFNSAIGKIQDSLSSTAGALGKLQDVVNQNAQALNTLVKQLSSNFGAISSVLNDILSRLDKVEAEVQIDRLITGRLQSLQTYVTQQLIRAAEIRASANLAATKMSECVLGQSKRVDFCGKGYHLMSFPQSAPHGVVFLHVTYVPAQEKNFTTAPAICHDGKAHFPREGVFVSNGTHWFVTQRNFYEPQIITTDNTFVSGNCDVVIGIVNNTVYDPLQPELDSFKEELDKYFKNHTSPDVDLGDISGINASVVNIQKEIDRLNEVAKNLNESLIDLQELGKYEQ

SEQ ID NO: 66 - protein, 1208 aa, Artificial Sequence
  source: /note="Description of Artificial Sequence: Synthetic polypeptide"
MFVFLVLLPLVSSQCVNLTTRTQLPPAYTNSFTRGVYYPDKVFRSSVLHSTQDLFLPFFSNVTWFHAIHVSGTNGTKRFDNPVLPFNDGVYFASTEKSNIIRGWIFGTTLDSKTQSLLIVNNATNVVIKVCEFQFCNDPFLGVYYHKNNKSWMESEFRVYSSANNCTFEYVSQPFLMDLEGKQGNFKNLREFVFKNIDGYFKIYSKHTPINLVRDLPQGFSALEPLVDLPIGINITRFQTLLALHRSYLTPGDSSSGWTAGAAAYYVGYLQPRTFLLKYNENGTITDAVDCALDPLSETKCTLKSFTVEKGIYQTSNFRVQPTESIVRFPNITNLCPFGEVFNATRFASVYAWNRKRISNCVADYSVLYNSASFSTFKCYGVSPTKLNDLCFTNVYADSFVIRGDEVRQIAPGQTGKIADYNYKLPDDFTGCVIAWNSNNLDSKVGGNYNYLYRLFRKSNLKPFERDISTEIYQAGSTPCNGVEGFNCYFPLQSYGFQPTNGVGYQPYRVVVLSFELLHAPATVCGPKKSTNLVKNKCVNFNFNGLTGTGVLTESNKKFLPFQQFGRDIADTTDAVRDPQTLEILDITPCSFGGVSVITPGTNTSNQVAVLYQNVNCTEVPVAIHADQLTPTWRVYSTGSNVFQTRAGCLIGAEHVNNSYECDIPIGAGICASYQTQTNSPRRARSVASQSIIAYTMSLGAENSVAYSNNSIAIPTNFTISVTTEILPVSMTKTSVDCTMYICGDSTECSNLLLQYGSFCTQLNRALTGIAVEQDKNTQEVFAQVKQIYKTPPIKDFGGFNFSQILPDPSKPSKRSFIEDLLFNKVTLADAGFIKQYGDCLGDIAARDLICAQKFNGLTVLPPLLTDEMIAQYTSALLAGTITSGWTFGAGPALQIPFAMQMAYRFNGIGVTQNVLYENQKLIANQFNSAIGKIQDSLSSGPSALGKLQDVVNQNAQALNTLVKQLSSNFGAISSVLNDILSRLDKVEAEVQIDRLITGRLQSLQTYVTQQLIRAAEIRASANLAATKMSECVLGQSKRVDFCGKGYHLMSFPQSAPHGVVFLHVTYVPAQEKNFTTAPAICHDGKAHFPREGVFVSNGTHWFVTQRNFYEPQIITTDNTFVSGNCDVVIGIVNNTVYDPLQPELDSFKEELDKYFKNHTSPDVDLGDISGINASVVNIQKEIDRLNEVAKNLNESLIDLQELGKYEQ

SEQ ID NO: 67 - protein, 1208 aa, Artificial Sequence
  source: /note="Description of Artificial Sequence: Synthetic polypeptide"
MFVFLVLLPLVSSQCVNLTTRTQLPPAYTNSFTRGVYYPDKVFRSSVLHSTQDLFLPFFSNVTWFHAIHVSGTNGTKRFDNPVLPFNDGVYFASTEKSNIIRGWIFGTTLDSKTQSLLIVNNATNVVIKVCEFQFCNDPFLGVYYHKNNKSWMESEFRVYSSANNCTFEYVSQPFLMDLEGKQGNFKNLREFVFKNIDGYFKIYSKHTPINLVRDLPQGFSALEPLVDLPIGINITRFQTLLALHRSYLTPGDSSSGWTAGAAAYYVGYLQPRTFLLKYNENGTITDAVDCALDPLSETKCTLKSFTVEKGIYQTSNFRVQPTESIVRFPNITNLCPFGEVFNATRFASVYAWNRKRISNCVADYSVLYNSASFSTFKCYGVSPTKLNDLCFTNVYADSFVIRGDEVRQIAPGQTGKIADYNYKLPDDFTGCVIAWNSNNLDSKVGGNYNYLYRLFRKSNLKPFERDISTEIYQAGSTPCNGVEGFNCYFPLQSYGFQPTNGVGYQPYRVVVLSFELLHAPATVCGPKKSTNLVKNKCVNFNFNGLTGTGVLTESNKKFLPFQQFGRDIADTTDAVRDPQTLEILDITPCSFGGVSVITPGTNTSNQVAVLYQNVNCTEVPVAIHADQLTPTWRVYSTGSNVFQTRAGCLIGAEHVNNSYECDIPIGAGICASYQTQTNSPRRARSVASQSIIAYTMSLGAENSVAYSNNSIAIPTNFTISVTTEILPVSMTKTSVDCTMYICGDSTECSNLLLQYGSFCTQLNRALTGIAVEQDKNTQEVFAQVKQIYKTPPIKDFGGFNFSQILPDPSKPSKRSFIEDLLFNKVTLADAGFIKQYGDCLGDIAARDLICAQKFNGLTVLPPLLTDEMIAQYTSALLAGTITSGWTFGAGPALQIPFAMQMAYRFNGIGVTQNVLYENQKLIANQFNSAIGKIQDSLSSTPGALGKLQDVVNQNAQALNTLVKQLSSNFGAISSVLNDILSRLDKVEAEVQIDRLITGRLQSLQTYVTQQLIRAAEIRASANLAATKMSECVLGQSKRVDFCGKGYHLMSFPQSAPHGVVFLHVTYVPAQEKNFTTAPAICHDGKAHFPREGVFVSNGTHWFVTQRNFYEPQIITTDNTFVSGNCDVVIGIVNNTVYDPLQPELDSFKEELDKYFKNHTSPDVDLGDISGINASVVNIQKEIDRLNEVAKNLNESLIDLQELGKYEQ

SEQ ID NO: 68 - protein, 1208 aa, Artificial Sequence
  source: /note="Description of Artificial Sequence: Synthetic polypeptide"
MFVFLVLLPLVSSQCVNLTTRTQLPPAYTNSFTRGVYYPDKVFRSSVLHSTQDLFLPFFSNVTWFHAIHVSGTNGTKRFDNPVLPFNDGVYFASTEKSNIIRGWIFGTTLDSKTQSLLIVNNATNVVIKVCEFQFCNDPFLGVYYHKNNKSWMESEFRVYSSANNCTFEYVSQPFLMDLEGKQGNFKNLREFVFKNIDGYFKIYSKHTPINLVRDLPQGFSALEPLVDLPIGINITRFQTLLALHRSYLTPGDSSSGWTAGAAAYYVGYLQPRTFLLKYNENGTITDAVDCALDPLSETKCTLKSFTVEKGIYQTSNFRVQPTESIVRFPNITNLCPFGEVFNATRFASVYAWNRKRISNCVADYSVLYNSASFSTFKCYGVSPTKLNDLCFTNVYADSFVIRGDEVRQIAPGQTGKIADYNYKLPDDFTGCVIAWNSNNLDSKVGGNYNYLYRLFRKSNLKPFERDISTEIYQAGSTPCNGVEGFNCYFPLQSYGFQPTNGVGYQPYRVVVLSFELLHAPATVCGPKKSTNLVKNKCVNFNFNGLTGTGVLTESNKKFLPFQQFGRDIADTTDAVRDPQTLEILDITPCSFGGVSVITPGTNTSNQVAVLYQNVNCTEVPVAIHADQLTPTWRVYSTGSNVFQTRAGCLIGAEHVNNSYECDIPIGAGICASYQTQTNSPRRARSVASQSIIAYTMSLGAENSVAYSNNSIAIPTNFTISVTTEILPVSMTKTSVDCTMYICGDSTECSNLLLQYGSFCTQLNRALTGIAVEQDKNTQEVFAQVKQIYKTPPIKDFGGFNFSQILPDPSKPSKRSFIEDLLFNKVTLADAGFIKQYGDCLGDIAARDLICAQKFNGLTVLPPLLTDEMIAQYTSALLAGTITSGWTFGAGPALQIPFAMQMAYRFNGIGVTQNVLYENQKLIANQFNSAIGKIQDSLSSGPGALGKLQDVVNQNAQALNTLVKQLSSNFGAISSVLNDILSRLDKVEAEVQIDRLITGRLQSLQTYVTQQLIRAAEIRASANLAATKMSECVLGQSKRVDFCGKGYHLMSFPQSAPHGVVFLHVTYVPAQEKNFTTAPAICHDGKAHFPREGVFVSNGTHWFVTQRNFYEPQIITTDNTFVSGNCDVVIGIVNNTVYDPLQPELDSFKEELDKYFKNHTSPDVDLGDISGINASVVNIQKEIDRLNEVAKNLNESLIDLQELGKYEQ

SEQ ID NO: 69 - protein, 1208 aa, Artificial Sequence
  source: /note="Description of Artificial Sequence: Synthetic polypeptide"
MFVFLVLLPLVSSQCVNLTTRTQLPPAYTNSFTRGVYYPDKVFRSSVLHSTQDLFLPFFSNVTWFHAIHVSGTNGTKRFDNPVLPFNDGVYFASTEKSNIIRGWIFGTTLDSKTQSLLIVNNATNVVIKVCEFQFCNDPFLGVYYHKNNKSWMESEFRVYSSANNCTFEYVSQPFLMDLEGKQGNFKNLREFVFKNIDGYFKIYSKHTPINLVRDLPQGFSALEPLVDLPIGINITRFQTLLALHRSYLTPGDSSSGWTAGAAAYYVGYLQPRTFLLKYNENGTITDAVDCALDPLSETKCTLKSFTVEKGIYQTSNFRVQPTESIVRFPNITNLCPFGEVFNATRFASVYAWNRKRISNCVADYSVLYNSASFSTFKCYGVSPTKLNDLCFTNVYADSFVIRGDEVRQIAPGQTGKIADYNYKLPDDFTGCVIAWNSNNLDSKVGGNYNYLYRLFRKSNLKPFERDISTEIYQAGSTPCNGVEGFNCYFPLQSYGFQPTNGVGYQPYRVVVLSFELLHAPATVCGPKKSTNLVKNKCVNFNFNGLTGTGVLTESNKKFLPFQQFGRDIADTTDAVRDPQTLEILDITPCSFGGVSVITPGTNTSNQVAVLYQNVNCTEVPVAIHADQLTPTWRVYSTGSNVFQTRAGCLIGAEHVNNSYECDIPIGAGICASYQTQTNSPRRARSVASQSIIAYTMSLGAENSVAYSNNSIAIPTNFTISVTTEILPVSMTKTSVDCTMYICGDSTECSNLLLQYGSFCTQLNRALTGIAVEQDKNTQEVFAQVKQIYKTPPIKDFGGFNFSQILPDPSKPSKRSFIEDLLFNKVTLADAGFIKQYGDCLGDIAARDLICAQKFNGLTVLPPLLTDEMIAQYTSALLAGTITSGWTFGAGPALQIPFAMQMAYRFNGIGVTQNVLYENQKLIANQFNSAIGKIQDSLSSGPSPLGKLQDVVNQNAQALNTLVKQLSSNFGAISSVLNDILSRLDKVEAEVQIDRLITGRLQSLQTYVTQQLIRAAEIRASANLAATKMSECVLGQSKRVDFCGKGYHLMSFPQSAPHGVVFLHVTYVPAQEKNFTTAPAICHDGKAHFPREGVFVSNGTHWFVTQRNFYEPQIITTDNTFVSGNCDVVIGIVNNTVYDPLQPELDSFKEELDKYFKNHTSPDVDLGDISGINASVVNIQKEIDRLNEVAKNLNESLIDLQELGKYEQ

SEQ ID NO: 70 - protein, 1208 aa, Artificial Sequence
  source: /note="Description of Artificial Sequence: Synthetic polypeptide"
MFVFLVLLPLVSSQCVNLTTRTQLPPAYTNSFTRGVYYPDKVFRSSVLHSTQDLFLPFFSNVTWFHAIHVSGTNGTKRFDNPVLPFNDGVYFASTEKSNIIRGWIFGTTLDSKTQSLLIVNNATNVVIKVCEFQFCNDPFLGVYYHKNNKSWMESEFRVYSSANNCTFEYVSQPFLMDLEGKQGNFKNLREFVFKNIDGYFKIYSKHTPINLVRDLPQGFSALEPLVDLPIGINITRFQTLLALHRSYLTPGDSSSGWTAGAAAYYVGYLQPRTFLLKYNENGTITDAVDCALDPLSETKCTLKSFTVEKGIYQTSNFRVQPTESIVRFPNITNLCPFGEVFNATRFASVYAWNRKRISNCVADYSVLYNSASFSTFKCYGVSPTKLNDLCFTNVYADSFVIRGDEVRQIAPGQTGKIADYNYKLPDDFTGCVIAWNSNNLDSKVGGNYNYLYRLFRKSNLKPFERDISTEIYQAGSTPCNGVEGFNCYFPLQSYGFQPTNGVGYQPYRVVVLSFELLHAPATVCGPKKSTNLVKNKCVNFNFNGLTGTGVLTESNKKFLPFQQFGRDIADTTDAVRDPQTLEILDITPCSFGGVSVITPGTNTSNQVAVLYQNVNCTEVPVAIHADQLTPTWRVYSTGSNVFQTRAGCLIGAEHVNNSYECDIPIGAGICASYQTQTNSPRRARSVASQSIIAYTMSLGAENSVAYSNNSIAIPTNFTISVTTEILPVSMTKTSVDCTMYICGDSTECSNLLLQYGSFCTQLNRALTGIAVEQDKNTQEVFAQVKQIYKTPPIKDFGGFNFSQILPDPSKPSKRSFIEDLLFNKVTLADAGFIKQYGDCLGDIAARDLICAQKFNGLTVLPPLLTDEMIAQYTSALLAGTITSGWTFGAGPALQIPFAMQMAYRFNGIGVTQNVLYENQKLIANQFNSAIGKIQDSLSSTPGPLGKLQDVVNQNAQALNTLVKQLSSNFGAISSVLNDILSRLDKVEAEVQIDRLITGRLQSLQTYVTQQLIRAAEIRASANLAATKMSECVLGQSKRVDFCGKGYHLMSFPQSAPHGVVFLHVTYVPAQEKNFTTAPAICHDGKAHFPREGVFVSNGTHWFVTQRNFYEPQIITTDNTFVSGNCDVVIGIVNNTVYDPLQPELDSFKEELDKYFKNHTSPDVDLGDISGINASVVNIQKEIDRLNEVAKNLNESLIDLQELGKYEQ

SEQ ID NO: 71 - protein, 1208 aa, Artificial Sequence
  source: /note="Description of Artificial Sequence: Synthetic polypeptide"
MFVFLVLLPLVSSQCVNLTTRTQLPPAYTNSFTRGVYYPDKVFRSSVLHSTQDLFLPFFSNVTWFHAIHVSGTNGTKRFDNPVLPFNDGVYFASTEKSNIIRGWIFGTTLDSKTQSLLIVNNATNVVIKVCEFQFCNDPFLGVYYHKNNKSWMESEFRVYSSANNCTFEYVSQPFLMDLEGKQGNFKNLREFVFKNIDGYFKIYSKHTPINLVRDLPQGFSALEPLVDLPIGINITRFQTLLALHRSYLTPGDSSSGWTAGAAAYYVGYLQPRTFLLKYNENGTITDAVDCALDPLSETKCTLKSFTVEKGIYQTSNFRVQPTESIVRFPNITNLCPFGEVFNATRFASVYAWNRKRISNCVADYSVLYNSASFSTFKCYGVSPTKLNDLCFTNVYADSFVIRGDEVRQIAPGQTGKIADYNYKLPDDFTGCVIAWNSNNLDSKVGGNYNYLYRLFRKSNLKPFERDISTEIYQAGSTPCNGVEGFNCYFPLQSYGFQPTNGVGYQPYRVVVLSFELLHAPATVCGPKKSTNLVKNKCVNFNFNGLTGTGVLTESNKKFLPFQQFGRDIADTTDAVRDPQTLEILDITPCSFGGVSVITPGTNTSNQVAVLYQDVNCTEVPVAIHADQLTPTWRVYSTGSNVFQTRAGCLIGAEHVNNSYECDIPIGAGICASYQTQTNSPRRARSVASQSIIAYTMSLGAENSVAYSNNSIAIPTNFTISVTTEILPVSMTKTSVDCTMYICGDSTECSNLLLQYGSFCTQLNRALTGIAVEQDKNTQEVFAQVKQIYKTPPIKDFGGFNFSQILPDPSKPSKRSFIEDLLFNKVTLADAGFIKQYGDCLGDIAARDLICAQKFNGLTVLPPLLTDEMIAQYTSALLAGTITSGWTFGAGAALQIPFAMQMAYRFNGIGVTQNVLYENQKLIANQFNSAIGKIQDSLSSGASALGKLQDVVNQNAQALNTLVKQLSSNFGAISSVLNDILSRLDPVEAEVQIDRLITGRLQSLQTYVTQQLIRAAEIRASANLAATKMSECVLGQSKRVDFCGKGYHLMSFPQSAPHGVVFLHVTYVPAQEKNFTTAPAICHDGKAHFPREGVFVSNGTHWFVTQRNFYEPQIITTDNTFVSGNCDVVIGIVNNTVYDPLQPELDSFKEELDKYFKNHTSPDVDLGDISGINASVVNIQKEIDRLNEVAKNLNESLIDLQELGKYEQ

SEQ ID NO: 72 - protein, 1208 aa, Artificial Sequence
  source: /note="Description of Artificial Sequence: Synthetic polypeptide"
MFVFLVLLPLVSSQCVNLTTRTQLPPAYTNSFTRGVYYPDKVFRSSVLHSTQDLFLPFFSNVTWFHAIHVSGTNGTKRFDNPVLPFNDGVYFASTEKSNIIRGWIFGTTLDSKTQSLLIVNNATNVVIKVCEFQFCNDPFLGVYYHKNNKSWMESEFRVYSSANNCTFEYVSQPFLMDLEGKQGNFKNLREFVFKNIDGYFKIYSKHTPINLVRDLPQGFSALEPLVDLPIGINITRFQTLLALHRSYLTPGDSSSGWTAGAAAYYVGYLQPRTFLLKYNENGTITDAVDCALDPLSETKCTLKSFTVEKGIYQTSNFRVQPTESIVRFPNITNLCPFGEVFNATRFASVYAWNRKRISNCVADYSVLYNSASFSTFKCYGVSPTKLNDLCFTNVYADSFVIRGDEVRQIAPGQTGKIADYNYKLPDDFTGCVIAWNSNNLDSKVGGNYNYLYRLFRKSNLKPFERDISTEIYQAGSTPCNGVEGFNCYFPLQSYGFQPTNGVGYQPYRVVVLSFELLHAPATVCGPKKSTNLVKNKCVNFNFNGLTGTGVLTESNKKFLPFQQFGRDIADTTDAVRDPQTLEILDITPCSFGGVSVITPGTNTSNQVAVLYQDVNCTEVPVAIHADQLTPTWRVYSTGSNVFQTRAGCLIGAEHVNNSYECDIPIGAGICASYQTQTNSPRRARSVASQSIIAYTMSLGAENSVAYSNNSIAIPTNFTISVTTEILPVSMTKTSVDCTMYICGDSTECSNLLLQYGSFCTQLNRALTGIAVEQDKNTQEVFAQVKQIYKTPPIKDFGGFNFSQILPDPSKPSKRSFIEDLLFNKVTLADAGFIKQYGDCLGDIAARDLICAQKFNGLTVLPPLLTDEMIAQYTSALLAGTITSGWTFGAGAALQIPFAMQMAYRFNGIGVTQNVLYENQKLIANQFNSAIGKIQDSLSSTAGALGKLQDVVNQNAQALNTLVKQLSSNFGAISSVLNDILSRLDPVEAEVQIDRLITGRLQSLQTYVTQQLIRAAEIRASANLAATKMSECVLGQSKRVDFCGKGYHLMSFPQSAPHGVVFLHVTYVPAQEKNFTTAPAICHDGKAHFPREGVFVSNGTHWFVTQRNFYEPQIITTDNTFVSGNCDVVIGIVNNTVYDPLQPELDSFKEELDKYFKNHTSPDVDLGDISGINASVVNIQKEIDRLNEVAKNLNESLIDLQELGKYEQ

SEQ ID NO: 73 - protein, 1208 aa, Artificial Sequence
  source: /note="Description of Artificial Sequence: Synthetic polypeptide"
MFVFLVLLPLVSSQCVNLTTRTQLPPAYTNSFTRGVYYPDKVFRSSVLHSTQDLFLPFFSNVTWFHAIHVSGTNGTKRFDNPVLPFNDGVYFASTEKSNIIRGWIFGTTLDSKTQSLLIVNNATNVVIKVCEFQFCNDPFLGVYYHKNNKSWMESEFRVYSSANNCTFEYVSQPFLMDLEGKQGNFKNLREFVFKNIDGYFKIYSKHTPINLVRDLPQGFSALEPLVDLPIGINITRFQTLLALHRSYLTPGDSSSGWTAGAAAYYVGYLQPRTFLLKYNENGTITDAVDCALDPLSETKCTLKSFTVEKGIYQTSNFRVQPTESIVRFPNITNLCPFGEVFNATRFASVYAWNRKRISNCVADYSVLYNSASFSTFKCYGVSPTKLNDLCFTNVYADSFVIRGDEVRQIAPGQTGKIADYNYKLPDDFTGCVIAWNSNNLDSKVGGNYNYLYRLFRKSNLKPFERDISTEIYQAGSTPCNGVEGFNCYFPLQSYGFQPTNGVGYQPYRVVVLSFELLHAPATVCGPKKSTNLVKNKCVNFNFNGLTGTGVLTESNKKFLPFQQFGRDIADTTDAVRDPQTLEILDITPCSFGGVSVITPGTNTSNQVAVLYQNVNCTEVPVAIHADQLTPTWRVYSTGSNVFQTRAGCLIGAEHVNNSYECDIPIGAGICASYQTQTNSPRRARSVASQSIIAYTMSLGAENSVAYSNNSIAIPTNFTISVTTEILPVSMTKTSVDCTMYICGDSTECSNLLLQYGSFCTQLNRALTGIAVEQDKNTQEVFAQVKQIYKTPPIKDFGGFNFSQILPDPSKPSKRSFIEDLLFNKVTLADAGFIKQYGDCLGDIAARDLICAQKFNGLTVLPPLLTDEMIAQYTSALLAGTITSGWTFGAGPALQIPFAMQMAYRFNGIGVTQNVLYENQKLIANQFNSAIGKIQDSLSSGPSALGKLQDVVNQNAQALNTLVKQLSSNFGAISSVLNDILSRLDPVEAEVQIDRLITGRLQSLQTYVTQQLIRAAEIRASANLAATKMSECVLGQSKRVDFCGKGYHLMSFPQSAPHGVVFLHVTYVPAQEKNFTTAPAICHDGKAHFPREGVFVSNGTHWFVTQRNFYEPQIITTDNTFVSGNCDVVIGIVNNTVYDPLQPELDSFKEELDKYFKNHTSPDVDLGDISGINASVVNIQKEIDRLNEVAKNLNESLIDLQELGKYEQ

SEQ ID NO: 74 - protein, 1208 aa, Artificial Sequence
  source: /note="Description of Artificial Sequence: Synthetic polypeptide"
MFVFLVLLPLVSSQCVNLTTRTQLPPAYTNSFTRGVYYPDKVFRSSVLHSTQDLFLPFFSNVTWFHAIHVSGTNGTKRFDNPVLPFNDGVYFASTEKSNIIRGWIFGTTLDSKTQSLLIVNNATNVVIKVCEFQFCNDPFLGVYYHKNNKSWMESEFRVYSSANNCTFEYVSQPFLMDLEGKQGNFKNLREFVFKNIDGYFKIYSKHTPINLVRDLPQGFSALEPLVDLPIGINITRFQTLLALHRSYLTPGDSSSGWTAGAAAYYVGYLQPRTFLLKYNENGTITDAVDCALDPLSETKCTLKSFTVEKGIYQTSNFRVQPTESIVRFPNITNLCPFGEVFNATRFASVYAWNRKRISNCVADYSVLYNSASFSTFKCYGVSPTKLNDLCFTNVYADSFVIRGDEVRQIAPGQTGKIADYNYKLPDDFTGCVIAWNSNNLDSKVGGNYNYLYRLFRKSNLKPFERDISTEIYQAGSTPCNGVEGFNCYFPLQSYGFQPTNGVGYQPYRVVVLSFELLHAPATVCGPKKSTNLVKNKCVNFNFNGLTGTGVLTESNKKFLPFQQFGRDIADTTDAVRDPQTLEILDITPCSFGGVSVITPGTNTSNQVAVLYQNVNCTEVPVAIHADQLTPTWRVYSTGSNVFQTRAGCLIGAEHVNNSYECDIPIGAGICASYQTQTNSPRRARSVASQSIIAYTMSLGAENSVAYSNNSIAIPTNFTISVTTEILPVSMTKTSVDCTMYICGDSTECSNLLLQYGSFCTQLNRALTGIAVEQDKNTQEVFAQVKQIYKTPPIKDFGGFNFSQILPDPSKPSKRSFIEDLLFNKVTLADAGFIKQYGDCLGDIAARDLICAQKFNGLTVLPPLLTDEMIAQYTSALLAGTITSGWTFGAGPALQIPFAMQMAYRFNGIGVTQNVLYENQKLIANQFNSAIGKIQDSLSSTPGALGKLQDVVNQNAQALNTLVKQLSSNFGAISSVLNDILSRLDPVEAEVQIDRLITGRLQSLQTYVTQQLIRAAEIRASANLAATKMSECVLGQSKRVDFCGKGYHLMSFPQSAPHGVVFLHVTYVPAQEKNFTTAPAICHDGKAHFPREGVFVSNGTHWFVTQRNFYEPQIITTDNTFVSGNCDVVIGIVNNTVYDPLQPELDSFKEELDKYFKNHTSPDVDLGDISGINASVVNIQKEIDRLNEVAKNLNESLIDLQELGKYEQ

SEQ ID NO: 75 - protein, 1208 aa, Artificial Sequence
  source: /note="Description of Artificial Sequence: Synthetic polypeptide"
MFVFLVLLPLVSSQCVNLTTRTQLPPAYTNSFTRGVYYPDKVFRSSVLHSTQDLFLPFFSNVTWFHAIHVSGTNGTKRFDNPVLPFNDGVYFASTEKSNIIRGWIFGTTLDSKTQSLLIVNNATNVVIKVCEFQFCNDPFLGVYYHKNNKSWMESEFRVYSSANNCTFEYVSQPFLMDLEGKQGNFKNLREFVFKNIDGYFKIYSKHTPINLVRDLPQGFSALEPLVDLPIGINITRFQTLLALHRSYLTPGDSSSGWTAGAAAYYVGYLQPRTFLLKYNENGTITDAVDCALDPLSETKCTLKSFTVEKGIYQTSNFRVQPTESIVRFPNITNLCPFGEVFNATRFASVYAWNRKRISNCVADYSVLYNSASFSTFKCYGVSPTKLNDLCFTNVYADSFVIRGDEVRQIAPGQTGKIADYNYKLPDDFTGCVIAWNSNNLDSKVGGNYNYLYRLFRKSNLKPFERDISTEIYQAGSTPCNGVEGFNCYFPLQSYGFQPTNGVGYQPYRVVVLSFELLHAPATVCGPKKSTNLVKNKCVNFNFNGLTGTGVLTESNKKFLPFQQFGRDIADTTDAVRDPQTLEILDITPCSFGGVSVITPGTNTSNQVAVLYQNVNCTEVPVAIHADQLTPTWRVYSTGSNVFQTRAGCLIGAEHVNNSYECDIPIGAGICASYQTQTNSPRRARSVASQSIIAYTMSLGAENSVAYSNNSIAIPTNFTISVTTEILPVSMTKTSVDCTMYICGDSTECSNLLLQYGSFCTQLNRALTGIAVEQDKNTQEVFAQVKQIYKTPPIKDFGGFNFSQILPDPSKPSKRSFIEDLLFNKVTLADAGFIKQYGDCLGDIAARDLICAQKFNGLTVLPPLLTDEMIAQYTSALLAGTITSGWTFGAGPALQIPFAMQMAYRFNGIGVTQNVLYENQKLIANQFNSAIGKIQDSLSSGPGALGKLQDVVNQNAQALNTLVKQLSSNFGAISSVLNDILSRLDPVEAEVQIDRLITGRLQSLQTYVTQQLIRAAEIRASANLAATKMSECVLGQSKRVDFCGKGYHLMSFPQSAPHGVVFLHVTYVPAQEKNFTTAPAICHDGKAHFPREGVFVSNGTHWFVTQRNFYEPQIITTDNTFVSGNCDVVIGIVNNTVYDPLQPELDSFKEELDKYFKNHTSPDVDLGDISGINASVVNIQKEIDRLNEVAKNLNESLIDLQELGKYEQ

SEQ ID NO: 76 - protein, 1208 aa, Artificial Sequence
  source: /note="Description of Artificial Sequence: Synthetic polypeptide"
MFVFLVLLPLVSSQCVNLTTRTQLPPAYTNSFTRGVYYPDKVFRSSVLHSTQDLFLPFFSNVTWFHAIHVSGTNGTKRFDNPVLPFNDGVYFASTEKSNIIRGWIFGTTLDSKTQSLLIVNNATNVVIKVCEFQFCNDPFLGVYYHKNNKSWMESEFRVYSSANNCTFEYVSQPFLMDLEGKQGNFKNLREFVFKNIDGYFKIYSKHTPINLVRDLPQGFSALEPLVDLPIGINITRFQTLLALHRSYLTPGDSSSGWTAGAAAYYVGYLQPRTFLLKYNENGTITDAVDCALDPLSETKCTLKSFTVEKGIYQTSNFRVQPTESIVRFPNITNLCPFGEVFNATRFASVYAWNRKRISNCVADYSVLYNSASFSTFKCYGVSPTKLNDLCFTNVYADSFVIRGDEVRQIAPGQTGKIADYNYKLPDDFTGCVIAWNSNNLDSKVGGNYNYLYRLFRKSNLKPFERDISTEIYQAGSTPCNGVEGFNCYFPLQSYGFQPTNGVGYQPYRVVVLSFELLHAPATVCGPKKSTNLVKNKCVNFNFNGLTGTGVLTESNKKFLPFQQFGRDIADTTDAVRDPQTLEILDITPCSFGGVSVITPGTNTSNQVAVLYQNVNCTEVPVAIHADQLTPTWRVYSTGSNVFQTRAGCLIGAEHVNNSYECDIPIGAGICASYQTQTNSPRRARSVASQSIIAYTMSLGAENSVAYSNNSIAIPTNFTISVTTEILPVSMTKTSVDCTMYICGDSTECSNLLLQYGSFCTQLNRALTGIAVEQDKNTQEVFAQVKQIYKTPPIKDFGGFNFSQILPDPSKPSKRSFIEDLLFNKVTLADAGFIKQYGDCLGDIAARDLICAQKFNGLTVLPPLLTDEMIAQYTSALLAGTITSGWTFGAGPALQIPFAMQMAYRFNGIGVTQNVLYENQKLIANQFNSAIGKIQDSLSSGPSPLGKLQDVVNQNAQALNTLVKQLSSNFGAISSVLNDILSRLDPVEAEVQIDRLITGRLQSLQTYVTQQLIRAAEIRASANLAATKMSECVLGQSKRVDFCGKGYHLMSFPQSAPHGVVFLHVTYVPAQEKNFTTAPAICHDGKAHFPREGVFVSNGTHWFVTQRNFYEPQIITTDNTFVSGNCDVVIGIVNNTVYDPLQPELDSFKEELDKYFKNHTSPDVDLGDISGINASVVNIQKEIDRLNEVAKNLNESLIDLQELGKYEQ

SEQ ID NO: 77 - protein, 1208 aa, Artificial Sequence
  source: /note="Description of Artificial Sequence: Synthetic polypeptide"
MFVFLVLLPLVSSQCVNLTTRTQLPPAYTNSFTRGVYYPDKVFRSSVLHSTQDLFLPFFSNVTWFHAIHVSGTNGTKRFDNPVLPFNDGVYFASTEKSNIIRGWIFGTTLDSKTQSLLIVNNATNVVIKVCEFQFCNDPFLGVYYHKNNKSWMESEFRVYSSANNCTFEYVSQPFLMDLEGKQGNFKNLREFVFKNIDGYFKIYSKHTPINLVRDLPQGFSALEPLVDLPIGINITRFQTLLALHRSYLTPGDSSSGWTAGAAAYYVGYLQPRTFLLKYNENGTITDAVDCALDPLSETKCTLKSFTVEKGIYQTSNFRVQPTESIVRFPNITNLCPFGEVFNATRFASVYAWNRKRISNCVADYSVLYNSASFSTFKCYGVSPTKLNDLCFTNVYADSFVIRGDEVRQIAPGQTGKIADYNYKLPDDFTGCVIAWNSNNLDSKVGGNYNYLYRLFRKSNLKPFERDISTEIYQAGSTPCNGVEGFNCYFPLQSYGFQPTNGVGYQPYRVVVLSFELLHAPATVCGPKKSTNLVKNKCVNFNFNGLTGTGVLTESNKKFLPFQQFGRDIADTTDAVRDPQTLEILDITPCSFGGVSVITPGTNTSNQVAVLYQNVNCTEVPVAIHADQLTPTWRVYSTGSNVFQTRAGCLIGAEHVNNSYECDIPIGAGICASYQTQTNSPRRARSVASQSIIAYTMSLGAENSVAYSNNSIAIPTNFTISVTTEILPVSMTKTSVDCTMYICGDSTECSNLLLQYGSFCTQLNRALTGIAVEQDKNTQEVFAQVKQIYKTPPIKDFGGFNFSQILPDPSKPSKRSFIEDLLFNKVTLADAGFIKQYGDCLGDIAARDLICAQKFNGLTVLPPLLTDEMIAQYTSALLAGTITSGWTFGAGPALQIPFAMQMAYRFNGIGVTQNVLYENQKLIANQFNSAIGKIQDSLSSTPGPLGKLQDVVNQNAQALNTLVKQLSSNFGAISSVLNDILSRLDPVEAEVQIDRLITGRLQSLQTYVTQQLIRAAEIRASANLAATKMSECVLGQSKRVDFCGKGYHLMSFPQSAPHGVVFLHVTYVPAQEKNFTTAPAICHDGKAHFPREGVFVSNGTHWFVTQRNFYEPQIITTDNTFVSGNCDVVIGIVNNTVYDPLQPELDSFKEELDKYFKNHTSPDVDLGDISGINASVVNIQKEIDRLNEVAKNLNESLIDLQELGKYEQ

SEQ ID NO: 78 - protein, 1208 aa, Artificial Sequence
  source: /note="Description of Artificial Sequence: Synthetic polypeptide"
MFVFLVLLPLVSSQCVNLTTRTQLPPAYTNSFTRGVYYPDKVFRSSVLHSTQDLFLPFFSNVTWFHAIHVSGTNGTKRFDNPVLPFNDGVYFASTEKSNIIRGWIFGTTLDSKTQSLLIVNNATNVVIKVCEFQFCNDPFLGVYYHKNNKSWMESEFRVYSSANNCTFEYVSQPFLMDLEGKQGNFKNLREFVFKNIDGYFKIYSKHTPINLVRDLPQGFSALEPLVDLPIGINITRFQTLLALHRSYLTPGDSSSGWTAGAAAYYVGYLQPRTFLLKYNENGTITDAVDCALDPLSETKCTLKSFTVEKGIYQTSNFRVQPTESIVRFPNITNLCPFGEVFNATRFASVYAWNRKRISNCVADYSVLYNSASFSTFKCYGVSPTKLNDLCFTNVYADSFVIRGDEVRQIAPGQTGKIADYNYKLPDDFTGCVIAWNSNNLDSKVGGNYNYLYRLFRKSNLKPFERDISTEIYQAGSTPCNGVEGFNCYFPLQSYGFQPTNGVGYQPYRVVVLSFELLHAPATVCGPKKSTNLVKNKCVNFNFNGLTGTGVLTESNKKFLPFQQFGRDIADTTDAVRDPQTLEILDITPCSFGGVSVITPGTNTSNQVAVLYQDVNCTEVPVAIHADQLTPTWRVYSTGSNVFQTRAGCLIGAEHVNNSYECDIPIGAGICASYQTQTNSPRRARSVASQSIIAYTMSLGAENSVAYSNNSIAIPTNFTISVTTEILPVSMTKTSVDCTMYICGDSTECSNLLLQYGSFCTQLNRALTGIAVEQDKNTQEVFAQVKQIYKTPPIKDFGGFNFSQILPDPSKPSKRSFIEDLLFNKVTLADAGFIKQYGDCLGDIAARDLICAQKFNGLTVLPPLLTDEMIAQYTSALLAGTITSGWTFGAGAALQIPFAMQMAYRFNGIGVTQNVLYENQKLIANQFNSAIGKIQDSLSSGASALGKLQDVVNQNAQALNTLVKQLSSNFGAISSVLNDILSRLDKPEAEVQIDRLITGRLQSLQTYVTQQLIRAAEIRASANLAATKMSECVLGQSKRVDFCGKGYHLMSFPQSAPHGVVFLHVTYVPAQEKNFTTAPAICHDGKAHFPREGVFVSNGTHWFVTQRNFYEPQIITTDNTFVSGNCDVVIGIVNNTVYDPLQPELDSFKEELDKYFKNHTSPDVDLGDISGINASVVNIQKEIDRLNEVAKNLNESLIDLQELGKYEQ

SEQ ID NO: 79 - protein, 1208 aa, Artificial Sequence
  source: /note="Description of Artificial Sequence: Synthetic polypeptide"
MFVFLVLLPLVSSQCVNLTTRTQLPPAYTNSFTRGVYYPDKVFRSSVLHSTQDLFLPFFSNVTWFHAIHVSGTNGTKRFDNPVLPFNDGVYFASTEKSNIIRGWIFGTTLDSKTQSLLIVNNATNVVIKVCEFQFCNDPFLGVYYHKNNKSWMESEFRVYSSANNCTFEYVSQPFLMDLEGKQGNFKNLREFVFKNIDGYFKIYSKHTPINLVRDLPQGFSALEPLVDLPIGINITRFQTLLALHRSYLTPGDSSSGWTAGAAAYYVGYLQPRTFLLKYNENGTITDAVDCALDPLSETKCTLKSFTVEKGIYQTSNFRVQPTESIVRFPNITNLCPFGEVFNATRFASVYAWNRKRISNCVADYSVLYNSASFSTFKCYGVSPTKLNDLCFTNVYADSFVIRGDEVRQIAPGQTGKIADYNYKLPDDFTGCVIAWNSNNLDSKVGGNYNYLYRLFRKSNLKPFERDISTEIYQAGSTPCNGVEGFNCYFPLQSYGFQPTNGVGYQPYRVVVLSFELLHAPATVCGPKKSTNLVKNKCVNFNFNGLTGTGVLTESNKKFLPFQQFGRDIADTTDAVRDPQTLEILDITPCSFGGVSVITPGTNTSNQVAVLYQDVNCTEVPVAIHADQLTPTWRVYSTGSNVFQTRAGCLIGAEHVNNSYECDIPIGAGICASYQTQTNSPRRARSVASQSIIAYTMSLGAENSVAYSNNSIAIPTNFTISVTTEILPVSMTKTSVDCTMYICGDSTECSNLLLQYGSFCTQLNRALTGIAVEQDKNTQEVFAQVKQIYKTPPIKDFGGFNFSQILPDPSKPSKRSFIEDLLFNKVTLADAGFIKQYGDCLGDIAARDLICAQKFNGLTVLPPLLTDEMIAQYTSALLAGTITSGWTFGAGAALQIPFAMQMAYRFNGIGVTQNVLYENQKLIANQFNSAIGKIQDSLSSTAGALGKLQDVVNQNAQALNTLVKQLSSNFGAISSVLNDILSRLDKPEAEVQIDRLITGRLQSLQTYVTQQLIRAAEIRASANLAATKMSECVLGQSKRVDFCGKGYHLMSFPQSAPHGVVFLHVTYVPAQEKNFTTAPAICHDGKAHFPREGVFVSNGTHWFVTQRNFYEPQIITTDNTFVSGNCDVVIGIVNNTVYDPLQPELDSFKEELDKYFKNHTSPDVDLGDISGINASVVNIQKEIDRLNEVAKNLNESLIDLQELGKYEQ

SEQ ID NO: 80 - protein, 1208 aa, Artificial Sequence
  source: /note="Description of Artificial Sequence: Synthetic polypeptide"
MFVFLVLLPLVSSQCVNLTTRTQLPPAYTNSFTRGVYYPDKVFRSSVLHSTQDLFLPFFSNVTWFHAIHVSGTNGTKRFDNPVLPFNDGVYFASTEKSNIIRGWIFGTTLDSKTQSLLIVNNATNVVIKVCEFQFCNDPFLGVYYHKNNKSWMESEFRVYSSANNCTFEYVSQPFLMDLEGKQGNFKNLREFVFKNIDGYFKIYSKHTPINLVRDLPQGFSALEPLVDLPIGINITRFQTLLALHRSYLTPGDSSSGWTAGAAAYYVGYLQPRTFLLKYNENGTITDAVDCALDPLSETKCTLKSFTVEKGIYQTSNFRVQPTESIVRFPNITNLCPFGEVFNATRFASVYAWNRKRISNCVADYSVLYNSASFSTFKCYGVSPTKLNDLCFTNVYADSFVIRGDEVRQIAPGQTGKIADYNYKLPDDFTGCVIAWNSNNLDSKVGGNYNYLYRLFRKSNLKPFERDISTEIYQAGSTPCNGVEGFNCYFPLQSYGFQPTNGVGYQPYRVVVLSFELLHAPATVCGPKKSTNLVKNKCVNFNFNGLTGTGVLTESNKKFLPFQQFGRDIADTTDAVRDPQTLEILDITPCSFGGVSVITPGTNTSNQVAVLYQNVNCTEVPVAIHADQLTPTWRVYSTGSNVFQTRAGCLIGAEHVNNSYECDIPIGAGICASYQTQTNSPRRARSVASQSIIAYTMSLGAENSVAYSNNSIAIPTNFTISVTTEILPVSMTKTSVDCTMYICGDSTECSNLLLQYGSFCTQLNRALTGIAVEQDKNTQEVFAQVKQIYKTPPIKDFGGFNFSQILPDPSKPSKRSFIEDLLFNKVTLADAGFIKQYGDCLGDIAARDLICAQKFNGLTVLPPLLTDEMIAQYTSALLAGTITSGWTFGAGPALQIPFAMQMAYRFNGIGVTQNVLYENQKLIANQFNSAIGKIQDSLSSGPSALGKLQDVVNQNAQALNTLVKQLSSNFGAISSVLNDILSRLDKPEAEVQIDRLITGRLQSLQTYVTQQLIRAAEIRASANLAATKMSECVLGQSKRVDFCGKGYHLMSFPQSAPHGVVFLHVTYVPAQEKNFTTAPAICHDGKAHFPREGVFVSNGTHWFVTQRNFYEPQIITTDNTFVSGNCDVVIGIVNNTVYDPLQPELDSFKEELDKYFKNHTSPDVDLGDISGINASVVNIQKEIDRLNEVAKNLNESLIDLQELGKYEQ

SEQ ID NO: 81 - protein, 1208 aa, Artificial Sequence
  source: /note="Description of Artificial Sequence: Synthetic polypeptide"
MFVFLVLLPLVSSQCVNLTTRTQLPPAYTNSFTRGVYYPDKVFRSSVLHSTQDLFLPFFSNVTWFHAIHVSGTNGTKRFDNPVLPFNDGVYFASTEKSNIIRGWIFGTTLDSKTQSLLIVNNATNVVIKVCEFQFCNDPFLGVYYHKNNKSWMESEFRVYSSANNCTFEYVSQPFLMDLEGKQGNFKNLREFVFKNIDGYFKIYSKHTPINLVRDLPQGFSALEPLVDLPIGINITRFQTLLALHRSYLTPGDSSSGWTAGAAAYYVGYLQPRTFLLKYNENGTITDAVDCALDPLSETKCTLKSFTVEKGIYQTSNFRVQPTESIVRFPNITNLCPFGEVFNATRFASVYAWNRKRISNCVADYSVLYNSASFSTFKCYGVSPTKLNDLCFTNVYADSFVIRGDEVRQIAPGQTGKIADYNYKLPDDFTGCVIAWNSNNLDSKVGGNYNYLYRLFRKSNLKPFERDISTEIYQAGSTPCNGVEGFNCYFPLQSYGFQPTNGVGYQPYRVVVLSFELLHAPATVCGPKKSTNLVKNKCVNFNFNGLTGTGVLTESNKKFLPFQQFGRDIADTTDAVRDPQTLEILDITPCSFGGVSVITPGTNTSNQVAVLYQNVNCTEVPVAIHADQLTPTWRVYSTGSNVFQTRAGCLIGAEHVNNSYECDIPIGAGICASYQTQTNSPRRARSVASQSIIAYTMSLGAENSVAYSNNSIAIPTNFTISVTTEILPVSMTKTSVDCTMYICGDSTECSNLLLQYGSFCTQLNRALTGIAVEQDKNTQEVFAQVKQIYKTPPIKDFGGFNFSQILPDPSKPSKRSFIEDLLFNKVTLADAGFIKQYGDCLGDIAARDLICAQKFNGLTVLPPLLTDEMIAQYTSALLAGTITSGWTFGAGPALQIPFAMQMAYRFNGIGVTQNVLYENQKLIANQFNSAIGKIQDSLSSTPGALGKLQDVVNQNAQALNTLVKQLSSNFGAISSVLNDILSRLDKPEAEVQIDRLITGRLQSLQTYVTQQLIRAAEIRASANLAATKMSECVLGQSKRVDFCGKGYHLMSFPQSAPHGVVFLHVTYVPAQEKNFTTAPAICHDGKAHFPREGVFVSNGTHWFVTQRNFYEPQIITTDNTFVSGNCDVVIGIVNNTVYDPLQPELDSFKEELDKYFKNHTSPDVDLGDISGINASVVNIQKEIDRLNEVAKNLNESLIDLQELGKYEQ

SEQ ID NO: 82 - protein, 1208 aa, Artificial Sequence
  source: /note="Description of Artificial Sequence: Synthetic polypeptide"
MFVFLVLLPLVSSQCVNLTTRTQLPPAYTNSFTRGVYYPDKVFRSSVLHSTQDLFLPFFSNVTWFHAIHVSGTNGTKRFDNPVLPFNDGVYFASTEKSNIIRGWIFGTTLDSKTQSLLIVNNATNVVIKVCEFQFCNDPFLGVYYHKNNKSWMESEFRVYSSANNCTFEYVSQPFLMDLEGKQGNFKNLREFVFKNIDGYFKIYSKHTPINLVRDLPQGFSALEPLVDLPIGINITRFQTLLALHRSYLTPGDSSSGWTAGAAAYYVGYLQPRTFLLKYNENGTITDAVDCALDPLSETKCTLKSFTVEKGIYQTSNFRVQPTESIVRFPNITNLCPFGEVFNATRFASVYAWNRKRISNCVADYSVLYNSASFSTFKCYGVSPTKLNDLCFTNVYADSFVIRGDEVRQIAPGQTGKIADYNYKLPDDFTGCVIAWNSNNLDSKVGGNYNYLYRLFRKSNLKPFERDISTEIYQAGSTPCNGVEGFNCYFPLQSYGFQPTNGVGYQPYRVVVLSFELLHAPATVCGPKKSTNLVKNKCVNFNFNGLTGTGVLTESNKKFLPFQQFGRDIADTTDAVRDPQTLEILDITPCSFGGVSVITPGTNTSNQVAVLYQNVNCTEVPVAIHADQLTPTWRVYSTGSNVFQTRAGCLIGAEHVNNSYECDIPIGAGICASYQTQTNSPRRARSVASQSIIAYTMSLGAENSVAYSNNSIAIPTNFTISVTTEILPVSMTKTSVDCTMYICGDSTECSNLLLQYGSFCTQLNRALTGIAVEQDKNTQEVFAQVKQIYKTPPIKDFGGFNFSQILPDPSKPSKRSFIEDLLFNKVTLADAGFIKQYGDCLGDIAARDLICAQKFNGLTVLPPLLTDEMIAQYTSALLAGTITSGWTFGAGPALQIPFAMQMAYRFNGIGVTQNVLYENQKLIANQFNSAIGKIQDSLSSGPGALGKLQDVVNQNAQALNTLVKQLSSNFGAISSVLNDILSRLDKPEAEVQIDRLITGRLQSLQTYVTQQLIRAAEIRASANLAATKMSECVLGQSKRVDFCGKGYHLMSFPQSAPHGVVFLHVTYVPAQEKNFTTAPAICHDGKAHFPREGVFVSNGTHWFVTQRNFYEPQIITTDNTFVSGNCDVVIGIVNNTVYDPLQPELDSFKEELDKYFKNHTSPDVDLGDISGINASVVNIQKEIDRLNEVAKNLNESLIDLQELGKYEQ

SEQ ID NO: 83 - protein, 1208 aa, Artificial Sequence
  source: /note="Description of Artificial Sequence: Synthetic polypeptide"
MFVFLVLLPLVSSQCVNLTTRTQLPPAYTNSFTRGVYYPDKVFRSSVLHSTQDLFLPFFSNVTWFHAIHVSGTNGTKRFDNPVLPFNDGVYFASTEKSNIIRGWIFGTTLDSKTQSLLIVNNATNVVIKVCEFQFCNDPFLGVYYHKNNKSWMESEFRVYSSANNCTFEYVSQPFLMDLEGKQGNFKNLREFVFKNIDGYFKIYSKHTPINLVRDLPQGFSALEPLVDLPIGINITRFQTLLALHRSYLTPGDSSSGWTAGAAAYYVGYLQPRTFLLKYNENGTITDAVDCALDPLSETKCTLKSFTVEKGIYQTSNFRVQPTESIVRFPNITNLCPFGEVFNATRFASVYAWNRKRISNCVADYSVLYNSASFSTFKCYGVSPTKLNDLCFTNVYADSFVIRGDEVRQIAPGQTGKIADYNYKLPDDFTGCVIAWNSNNLDSKVGGNYNYLYRLFRKSNLKPFERDISTEIYQAGSTPCNGVEGFNCYFPLQSYGFQPTNGVGYQPYRVVVLSFELLHAPATVCGPKKSTNLVKNKCVNFNFNGLTGTGVLTESNKKFLPFQQFGRDIADTTDAVRDPQTLEILDITPCSFGGVSVITPGTNTSNQVAVLYQNVNCTEVPVAIHADQLTPTWRVYSTGSNVFQTRAGCLIGAEHVNNSYECDIPIGAGICASYQTQTNSPRRARSVASQSIIAYTMSLGAENSVAYSNNSIAIPTNFTISVTTEILPVSMTKTSVDCTMYICGDSTECSNLLLQYGSFCTQLNRALTGIAVEQDKNTQEVFAQVKQIYKTPPIKDFGGFNFSQILPDPSKPSKRSFIEDLLFNKVTLADAGFIKQYGDCLGDIAARDLICAQKFNGLTVLPPLLTDEMIAQYTSALLAGTITSGWTFGAGPALQIPFAMQMAYRFNGIGVTQNVLYENQKLIANQFNSAIGKIQDSLSSGPSPLGKLQDVVNQNAQALNTLVKQLSSNFGAISSVLNDILSRLDKPEAEVQIDRLITGRLQSLQTYVTQQLIRAAEIRASANLAATKMSECVLGQSKRVDFCGKGYHLMSFPQSAPHGVVFLHVTYVPAQEKNFTTAPAICHDGKAHFPREGVFVSNGTHWFVTQRNFYEPQIITTDNTFVSGNCDVVIGIVNNTVYDPLQPELDSFKEELDKYFKNHTSPDVDLGDISGINASVVNIQKEIDRLNEVAKNLNESLIDLQELGKYEQ

SEQ ID NO: 84 - protein, 1208 aa, Artificial Sequence
  source: /note="Description of Artificial Sequence: Synthetic polypeptide"
MFVFLVLLPLVSSQCVNLTTRTQLPPAYTNSFTRGVYYPDKVFRSSVLHSTQDLFLPFFSNVTWFHAIHVSGTNGTKRFDNPVLPFNDGVYFASTEKSNIIRGWIFGTTLDSKTQSLLIVNNATNVVIKVCEFQFCNDPFLGVYYHKNNKSWMESEFRVYSSANNCTFEYVSQPFLMDLEGKQGNFKNLREFVFKNIDGYFKIYSKHTPINLVRDLPQGFSALEPLVDLPIGINITRFQTLLALHRSYLTPGDSSSGWTAGAAAYYVGYLQPRTFLLKYNENGTITDAVDCALDPLSETKCTLKSFTVEKGIYQTSNFRVQPTESIVRFPNITNLCPFGEVFNATRFASVYAWNRKRISNCVADYSVLYNSASFSTFKCYGVSPTKLNDLCFTNVYADSFVIRGDEVRQIAPGQTGKIADYNYKLPDDFTGCVIAWNSNNLDSKVGGNYNYLYRLFRKSNLKPFERDISTEIYQAGSTPCNGVEGFNCYFPLQSYGFQPTNGVGYQPYRVVVLSFELLHAPATVCGPKKSTNLVKNKCVNFNFNGLTGTGVLTESNKKFLPFQQFGRDIADTTDAVRDPQTLEILDITPCSFGGVSVITPGTNTSNQVAVLYQNVNCTEVPVAIHADQLTPTWRVYSTGSNVFQTRAGCLIGAEHVNNSYECDIPIGAGICASYQTQTNSPRRARSVASQSIIAYTMSLGAENSVAYSNNSIAIPTNFTISVTTEILPVSMTKTSVDCTMYICGDSTECSNLLLQYGSFCTQLNRALTGIAVEQDKNTQEVFAQVKQIYKTPPIKDFGGFNFSQILPDPSKPSKRSFIEDLLFNKVTLADAGFIKQYGDCLGDIAARDLICAQKFNGLTVLPPLLTDEMIAQYTSALLAGTITSGWTFGAGPALQIPFAMQMAYRFNGIGVTQNVLYENQKLIANQFNSAIGKIQDSLSSTPGPLGKLQDVVNQNAQALNTLVKQLSSNFGAISSVLNDILSRLDKPEAEVQIDRLITGRLQSLQTYVTQQLIRAAEIRASANLAATKMSECVLGQSKRVDFCGKGYHLMSFPQSAPHGVVFLHVTYVPAQEKNFTTAPAICHDGKAHFPREGVFVSNGTHWFVTQRNFYEPQIITTDNTFVSGNCDVVIGIVNNTVYDPLQPELDSFKEELDKYFKNHTSPDVDLGDISGINASVVNIQKEIDRLNEVAKNLNESLIDLQELGKYEQ

SEQ ID NO: 85 - protein, 1208 aa, Artificial Sequence
  source: /note="Description of Artificial Sequence: Synthetic polypeptide"
MFVFLVLLPLVSSQCVNLTTRTQLPPAYTNSFTRGVYYPDKVFRSSVLHSTQDLFLPFFSNVTWFHAIHVSGTNGTKRFDNPVLPFNDGVYFASTEKSNIIRGWIFGTTLDSKTQSLLIVNNATNVVIKVCEFQFCNDPFLGVYYHKNNKSWMESEFRVYSSANNCTFEYVSQPFLMDLEGKQGNFKNLREFVFKNIDGYFKIYSKHTPINLVRDLPQGFSALEPLVDLPIGINITRFQTLLALHRSYLTPGDSSSGWTAGAAAYYVGYLQPRTFLLKYNENGTITDAVDCALDPLSETKCTLKSFTVEKGIYQTSNFRVQPTESIVRFPNITNLCPFGEVFNATRFASVYAWNRKRISNCVADYSVLYNSASFSTFKCYGVSPTKLNDLCFTNVYADSFVIRGDEVRQIAPGQTGKIADYNYKLPDDFTGCVIAWNSNNLDSKVGGNYNYLYRLFRKSNLKPFERDISTEIYQAGSTPCNGVEGFNCYFPLQSYGFQPTNGVGYQPYRVVVLSFELLHAPATVCGPKKSTNLVKNKCVNFNFNGLTGTGVLTESNKKFLPFQQFGRDIADTTDAVRDPQTLEILDITPCSFGGVSVITPGTNTSNQVAVLYQDVNCTEVPVAIHADQLTPTWRVYSTGSNVFQTRAGCLIGAEHVNNSYECDIPIGAGICASYQTQTNSPRRARSVASQSIIAYTMSLGAENSVAYSNNSIAIPTNFTISVTTEILPVSMTKTSVDCTMYICGDSTECSNLLLQYGSFCTQLNRALTGIAVEQDKNTQEVFAQVKQIYKTPPIKDFGGFNFSQILPDPSKPSKRSFIEDLLFNKVTLADAGFIKQYGDCLGDIAARDLICAQKFNGLTVLPPLLTDEMIAQYTSALLAGTITSGWTFGAGAALQIPFAMQMAYRFNGIGVTQNVLYENQKLIANQFNSAIGKIQDSLSSGASALGKLQDVVNQNAQALNTLVKQLSSNFGAISSVLNDILSRLDPPEAEVQIDRLITGRLQSLQTYVTQQLIRAAEIRASANLAATKMSECVLGQSKRVDFCGKGYHLMSFPQSAPHGVVFLHVTYVPAQEKNFTTAPAICHDGKAHFPREGVFVSNGTHWFVTQRNFYEPQIITTDNTFVSGNCDVVIGIVNNTVYDPLQPELDSFKEELDKYFKNHTSPDVDLGDISGINASVVNIQKEIDRLNEVAKNLNESLIDLQELGKYEQ

SEQ ID NO: 86 - protein, 1208 aa, Artificial Sequence
  source: /note="Description of Artificial Sequence: Synthetic polypeptide"
MFVFLVLLPLVSSQCVNLTTRTQLPPAYTNSFTRGVYYPDKVFRSSVLHSTQDLFLPFFSNVTWFHAIHVSGTNGTKRFDNPVLPFNDGVYFASTEKSNIIRGWIFGTTLDSKTQSLLIVNNATNVVIKVCEFQFCNDPFLGVYYHKNNKSWMESEFRVYSSANNCTFEYVSQPFLMDLEGKQGNFKNLREFVFKNIDGYFKIYSKHTPINLVRDLPQGFSALEPLVDLPIGINITRFQTLLALHRSYLTPGDSSSGWTAGAAAYYVGYLQPRTFLLKYNENGTITDAVDCALDPLSETKCTLKSFTVEKGIYQTSNFRVQPTESIVRFPNITNLCPFGEVFNATRFASVYAWNRKRISNCVADYSVLYNSASFSTFKCYGVSPTKLNDLCFTNVYADSFVIRGDEVRQIAPGQTGKIADYNYKLPDDFTGCVIAWNSNNLDSKVGGNYNYLYRLFRKSNLKPFERDISTEIYQAGSTPCNGVEGFNCYFPLQSYGFQPTNGVGYQPYRVVVLSFELLHAPATVCGPKKSTNLVKNKCVNFNFNGLTGTGVLTESNKKFLPFQQFGRDIADTTDAVRDPQTLEILDITPCSFGGVSVITPGTNTSNQVAVLYQDVNCTEVPVAIHADQLTPTWRVYSTGSNVFQTRAGCLIGAEHVNNSYECDIPIGAGICASYQTQTNSPRRARSVASQSIIAYTMSLGAENSVAYSNNSIAIPTNFTISVTTEILPVSMTKTSVDCTMYICGDSTECSNLLLQYGSFCTQLNRALTGIAVEQDKNTQEVFAQVKQIYKTPPIKDFGGFNFSQILPDPSKPSKRSFIEDLLFNKVTLADAGFIKQYGDCLGDIAARDLICAQKFNGLTVLPPLLTDEMIAQYTSALLAGTITSGWTFGAGAALQIPFAMQMAYRFNGIGVTQNVLYENQKLIANQFNSAIGKIQDSLSSTAGALGKLQDVVNQNAQALNTLVKQLSSNFGAISSVLNDILSRLDPPEAEVQIDRLITGRLQSLQTYVTQQLIRAAEIRASANLAATKMSECVLGQSKRVDFCGKGYHLMSFPQSAPHGVVFLHVTYVPAQEKNFTTAPAICHDGKAHFPREGVFVSNGTHWFVTQRNFYEPQIITTDNTFVSGNCDVVIGIVNNTVYDPLQPELDSFKEELDKYFKNHTSPDVDLGDISGINASVVNIQKEIDRLNEVAKNLNESLIDLQELGKYEQ

SEQ ID NO: 87 - protein, 1208 aa, Artificial Sequence
  source: /note="Description of Artificial Sequence: Synthetic polypeptide"
MFVFLVLLPLVSSQCVNLTTRTQLPPAYTNSFTRGVYYPDKVFRSSVLHSTQDLFLPFFSNVTWFHAIHVSGTNGTKRFDNPVLPFNDGVYFASTEKSNIIRGWIFGTTLDSKTQSLLIVNNATNVVIKVCEFQFCNDPFLGVYYHKNNKSWMESEFRVYSSANNCTFEYVSQPFLMDLEGKQGNFKNLREFVFKNIDGYFKIYSKHTPINLVRDLPQGFSALEPLVDLPIGINITRFQTLLALHRSYLTPGDSSSGWTAGAAAYYVGYLQPRTFLLKYNENGTITDAVDCALDPLSETKCTLKSFTVEKGIYQTSNFRVQPTESIVRFPNITNLCPFGEVFNATRFASVYAWNRKRISNCVADYSVLYNSASFSTFKCYGVSPTKLNDLCFTNVYADSFVIRGDEVRQIAPGQTGKIADYNYKLPDDFTGCVIAWNSNNLDSKVGGNYNYLYRLFRKSNLKPFERDISTEIYQAGSTPCNGVEGFNCYFPLQSYGFQPTNGVGYQPYRVVVLSFELLHAPATVCGPKKSTNLVKNKCVNFNFNGLTGTGVLTESNKKFLPFQQFGRDIADTTDAVRDPQTLEILDITPCSFGGVSVITPGTNTSNQVAVLYQNVNCTEVPVAIHADQLTPTWRVYSTGSNVFQTRAGCLIGAEHVNNSYECDIPIGAGICASYQTQTNSPRRARSVASQSIIAYTMSLGAENSVAYSNNSIAIPTNFTISVTTEILPVSMTKTSVDCTMYICGDSTECSNLLLQYGSFCTQLNRALTGIAVEQDKNTQEVFAQVKQIYKTPPIKDFGGFNFSQILPDPSKPSKRSFIEDLLFNKVTLADAGFIKQYGDCLGDIAARDLICAQKFNGLTVLPPLLTDEMIAQYTSALLAGTITSGWTFGAGPALQIPFAMQMAYRFNGIGVTQNVLYENQKLIANQFNSAIGKIQDSLSSGPSALGKLQDVVNQNAQALNTLVKQLSSNFGAISSVLNDILSRLDPPEAEVQIDRLITGRLQSLQTYVTQQLIRAAEIRASANLAATKMSECVLGQSKRVDFCGKGYHLMSFPQSAPHGVVFLHVTYVPAQEKNFTTAPAICHDGKAHFPREGVFVSNGTHWFVTQRNFYEPQIITTDNTFVSGNCDVVIGIVNNTVYDPLQPELDSFKEELDKYFKNHTSPDVDLGDISGINASVVNIQKEIDRLNEVAKNLNESLIDLQELGKYEQ

SEQ ID NO: 88 - protein, 1208 aa, Artificial Sequence
  source: /note="Description of Artificial Sequence: Synthetic polypeptide"
MFVFLVLLPLVSSQCVNLTTRTQLPPAYTNSFTRGVYYPDKVFRSSVLHSTQDLFLPFFSNVTWFHAIHVSGTNGTKRFDNPVLPFNDGVYFASTEKSNIIRGWIFGTTLDSKTQSLLIVNNATNVVIKVCEFQFCNDPFLGVYYHKNNKSWMESEFRVYSSANNCTFEYVSQPFLMDLEGKQGNFKNLREFVFKNIDGYFKIYSKHTPINLVRDLPQGFSALEPLVDLPIGINITRFQTLLALHRSYLTPGDSSSGWTAGAAAYYVGYLQPRTFLLKYNENGTITDAVDCALDPLSETKCTLKSFTVEKGIYQTSNFRVQPTESIVRFPNITNLCPFGEVFNATRFASVYAWNRKRISNCVADYSVLYNSASFSTFKCYGVSPTKLNDLCFTNVYADSFVIRGDEVRQIAPGQTGKIADYNYKLPDDFTGCVIAWNSNNLDSKVGGNYNYLYRLFRKSNLKPFERDISTEIYQAGSTPCNGVEGFNCYFPLQSYGFQPTNGVGYQPYRVVVLSFELLHAPATVCGPKKSTNLVKNKCVNFNFNGLTGTGVLTESNKKFLPFQQFGRDIADTTDAVRDPQTLEILDITPCSFGGVSVITPGTNTSNQVAVLYQNVNCTEVPVAIHADQLTPTWRVYSTGSNVFQTRAGCLIGAEHVNNSYECDIPIGAGICASYQTQTNSPRRARSVASQSIIAYTMSLGAENSVAYSNNSIAIPTNFTISVTTEILPVSMTKTSVDCTMYICGDSTECSNLLLQYGSFCTQLNRALTGIAVEQDKNTQEVFAQVKQIYKTPPIKDFGGFNFSQILPDPSKPSKRSFIEDLLFNKVTLADAGFIKQYGDCLGDIAARDLICAQKFNGLTVLPPLLTDEMIAQYTSALLAGTITSGWTFGAGPALQIPFAMQMAYRFNGIGVTQNVLYENQKLIANQFNSAIGKIQDSLSSTPGALGKLQDVVNQNAQALNTLVKQLSSNFGAISSVLNDILSRLDPPEAEVQIDRLITGRLQSLQTYVTQQLIRAAEIRASANLAATKMSECVLGQSKRVDFCGKGYHLMSFPQSAPHGVVFLHVTYVPAQEKNFTTAPAICHDGKAHFPREGVFVSNGTHWFVTQRNFYEPQIITTDNTFVSGNCDVVIGIVNNTVYDPLQPELDSFKEELDKYFKNHTSPDVDLGDISGINASVVNIQKEIDRLNEVAKNLNESLIDLQELGKYEQ

SEQ ID NO: 89 - protein, 1208 aa, Artificial Sequence
  source: /note="Description of Artificial Sequence: Synthetic polypeptide"
MFVFLVLLPLVSSQCVNLTTRTQLPPAYTNSFTRGVYYPDKVFRSSVLHSTQDLFLPFFSNVTWFHAIHVSGTNGTKRFDNPVLPFNDGVYFASTEKSNIIRGWIFGTTLDSKTQSLLIVNNATNVVIKVCEFQFCNDPFLGVYYHKNNKSWMESEFRVYSSANNCTFEYVSQPFLMDLEGKQGNFKNLREFVFKNIDGYFKIYSKHTPINLVRDLPQGFSALEPLVDLPIGINITRFQTLLALHRSYLTPGDSSSGWTAGAAAYYVGYLQPRTFLLKYNENGTITDAVDCALDPLSETKCTLKSFTVEKGIYQTSNFRVQPTESIVRFPNITNLCPFGEVFNATRFASVYAWNRKRISNCVADYSVLYNSASFSTFKCYGVSPTKLNDLCFTNVYADSFVIRGDEVRQIAPGQTGKIADYNYKLPDDFTGCVIAWNSNNLDSKVGGNYNYLYRLFRKSNLKPFERDISTEIYQAGSTPCNGVEGFNCYFPLQSYGFQPTNGVGYQPYRVVVLSFELLHAPATVCGPKKSTNLVKNKCVNFNFNGLTGTGVLTESNKKFLPFQQFGRDIADTTDAVRDPQTLEILDITPCSFGGVSVITPGTNTSNQVAVLYQNVNCTEVPVAIHADQLTPTWRVYSTGSNVFQTRAGCLIGAEHVNNSYECDIPIGAGICASYQTQTNSPRRARSVASQSIIAYTMSLGAENSVAYSNNSIAIPTNFTISVTTEILPVSMTKTSVDCTMYICGDSTECSNLLLQYGSFCTQLNRALTGIAVEQDKNTQEVFAQVKQIYKTPPIKDFGGFNFSQILPDPSKPSKRSFIEDLLFNKVTLADAGFIKQYGDCLGDIAARDLICAQKFNGLTVLPPLLTDEMIAQYTSALLAGTITSGWTFGAGPALQIPFAMQMAYRFNGIGVTQNVLYENQKLIANQFNSAIGKIQDSLSSGPGALGKLQDVVNQNAQALNTLVKQLSSNFGAISSVLNDILSRLDPPEAEVQIDRLITGRLQSLQTYVTQQLIRAAEIRASANLAATKMSECVLGQSKRVDFCGKGYHLMSFPQSAPHGVVFLHVTYVPAQEKNFTTAPAICHDGKAHFPREGVFVSNGTHWFVTQRNFYEPQIITTDNTFVSGNCDVVIGIVNNTVYDPLQPELDSFKEELDKYFKNHTSPDVDLGDISGINASVVNIQKEIDRLNEVAKNLNESLIDLQELGKYEQ

SEQ ID NO: 90 - protein, 1208 aa, Artificial Sequence
  source: /note="Description of Artificial Sequence: Synthetic polypeptide"
MFVFLVLLPLVSSQCVNLTTRTQLPPAYTNSFTRGVYYPDKVFRSSVLHSTQDLFLPFFSNVTWFHAIHVSGTNGTKRFDNPVLPFNDGVYFASTEKSNIIRGWIFGTTLDSKTQSLLIVNNATNVVIKVCEFQFCNDPFLGVYYHKNNKSWMESEFRVYSSANNCTFEYVSQPFLMDLEGKQGNFKNLREFVFKNIDGYFKIYSKHTPINLVRDLPQGFSALEPLVDLPIGINITRFQTLLALHRSYLTPGDSSSGWTAGAAAYYVGYLQPRTFLLKYNENGTITDAVDCALDPLSETKCTLKSFTVEKGIYQTSNFRVQPTESIVRFPNITNLCPFGEVFNATRFASVYAWNRKRISNCVADYSVLYNSASFSTFKCYGVSPTKLNDLCFTNVYADSFVIRGDEVRQIAPGQTGKIADYNYKLPDDFTGCVIAWNSNNLDSKVGGNYNYLYRLFRKSNLKPFERDISTEIYQAGSTPCNGVEGFNCYFPLQSYGFQPTNGVGYQPYRVVVLSFELLHAPATVCGPKKSTNLVKNKCVNFNFNGLTGTGVLTESNKKFLPFQQFGRDIADTTDAVRDPQTLEILDITPCSFGGVSVITPGTNTSNQVAVLYQNVNCTEVPVAIHADQLTPTWRVYSTGSNVFQTRAGCLIGAEHVNNSYECDIPIGAGICASYQTQTNSPRRARSVASQSIIAYTMSLGAENSVAYSNNSIAIPTNFTISVTTEILPVSMTKTSVDCTMYICGDSTECSNLLLQYGSFCTQLNRALTGIAVEQDKNTQEVFAQVKQIYKTPPIKDFGGFNFSQILPDPSKPSKRSFIEDLLFNKVTLADAGFIKQYGDCLGDIAARDLICAQKFNGLTVLPPLLTDEMIAQYTSALLAGTITSGWTFGAGPALQIPFAMQMAYRFNGIGVTQNVLYENQKLIANQFNSAIGKIQDSLSSGPSPLGKLQDVVNQNAQALNTLVKQLSSNFGAISSVLNDILSRLDPPEAEVQIDRLITGRLQSLQTYVTQQLIRAAEIRASANLAATKMSECVLGQSKRVDFCGKGYHLMSFPQSAPHGVVFLHVTYVPAQEKNFTTAPAICHDGKAHFPREGVFVSNGTHWFVTQRNFYEPQIITTDNTFVSGNCDVVIGIVNNTVYDPLQPELDSFKEELDKYFKNHTSPDVDLGDISGINASVVNIQKEIDRLNEVAKNLNESLIDLQELGKYEQ

SEQ ID NO: 91 - protein, 1208 aa, Artificial Sequence
  source: /note="Description of Artificial Sequence: Synthetic polypeptide"
MFVFLVLLPLVSSQCVNLTTRTQLPPAYTNSFTRGVYYPDKVFRSSVLHSTQDLFLPFFSNVTWFHAIHVSGTNGTKRFDNPVLPFNDGVYFASTEKSNIIRGWIFGTTLDSKTQSLLIVNNATNVVIKVCEFQFCNDPFLGVYYHKNNKSWMESEFRVYSSANNCTFEYVSQPFLMDLEGKQGNFKNLREFVFKNIDGYFKIYSKHTPINLVRDLPQGFSALEPLVDLPIGINITRFQTLLALHRSYLTPGDSSSGWTAGAAAYYVGYLQPRTFLLKYNENGTITDAVDCALDPLSETKCTLKSFTVEKGIYQTSNFRVQPTESIVRFPNITNLCPFGEVFNATRFASVYAWNRKRISNCVADYSVLYNSASFSTFKCYGVSPTKLNDLCFTNVYADSFVIRGDEVRQIAPGQTGKIADYNYKLPDDFTGCVIAWNSNNLDSKVGGNYNYLYRLFRKSNLKPFERDISTEIYQAGSTPCNGVEGFNCYFPLQSYGFQPTNGVGYQPYRVVVLSFELLHAPATVCGPKKSTNLVKNKCVNFNFNGLTGTGVLTESNKKFLPFQQFGRDIADTTDAVRDPQTLEILDITPCSFGGVSVITPGTNTSNQVAVLYQNVNCTEVPVAIHADQLTPTWRVYSTGSNVFQTRAGCLIGAEHVNNSYECDIPIGAGICASYQTQTNSPRRARSVASQSIIAYTMSLGAENSVAYSNNSIAIPTNFTISVTTEILPVSMTKTSVDCTMYICGDSTECSNLLLQYGSFCTQLNRALTGIAVEQDKNTQEVFAQVKQIYKTPPIKDFGGFNFSQILPDPSKPSKRSFIEDLLFNKVTLADAGFIKQYGDCLGDIAARDLICAQKFNGLTVLPPLLTDEMIAQYTSALLAGTITSGWTFGAGPALQIPFAMQMAYRFNGIGVTQNVLYENQKLIANQFNSAIGKIQDSLSSTPGPLGKLQDVVNQNAQALNTLVKQLSSNFGAISSVLNDILSRLDPPEAEVQIDRLITGRLQSLQTYVTQQLIRAAEIRASANLAATKMSECVLGQSKRVDFCGKGYHLMSFPQSAPHGVVFLHVTYVPAQEKNFTTAPAICHDGKAHFPREGVFVSNGTHWFVTQRNFYEPQIITTDNTFVSGNCDVVIGIVNNTVYDPLQPELDSFKEELDKYFKNHTSPDVDLGDISGINASVVNIQKEIDRLNEVAKNLNESLIDLQELGKYEQ

SEQ ID NO: 92 - protein, 1208 aa, Artificial Sequence
  source: /note="Description of Artificial Sequence: Synthetic polypeptide"
MFVFLVLLPLVSSQCVNLTTRTQLPPAYTNSFTRGVYYPDKVFRSSVLHSTQDLFLPFFSNVTWFHAIHVSGTNGTKRFDNPVLPFNDGVYFASTEKSNIIRGWIFGTTLDSKTQSLLIVNNATNVVIKVCEFQFCNDPFLGVYYHKNNKSWMESEFRVYSSANNCTFEYVSQPFLMDLEGKQGNFKNLREFVFKNIDGYFKIYSKHTPINLVRDLPQGFSALEPLVDLPIGINITRFQTLLALHRSYLTPGDSSSGWTAGAAAYYVGYLQPRTFLLKYNENGTITDAVDCALDPLSETKCTLKSFTVEKGIYQTSNFRVQPTESIVRFPNITNLCPFGEVFNATRFASVYAWNRKRISNCVADYSVLYNSASFSTFKCYGVSPTKLNDLCFTNVYADSFVIRGDEVRQIAPGQTGKIADYNYKLPDDFTGCVIAWNSNNLDSKVGGNYNYLYRLFRKSNLKPFERDISTEIYQAGSTPCNGVEGFNCYFPLQSYGFQPTNGVGYQPYRVVVLSFELLHAPATVCGPKKSTNLVKNKCVNFNFNGLTGTGVLTESNKKFLPFQQFGRDIADTTDAVRDPQTLEILDITPCSFGGVSVITPGTNTSNQVAVLYQDVNCTEVPVAIHADQLTPTWRVYSTGSNVFQTRAGCLIGAEHVNNSYECDIPIGAGICASYQTQTNSPSRAGSVASQSIIAYTMSLGAENSVAYSNNSIAIPTNFTISVTTEILPVSMTKTSVDCTMYICGDSTECSNLLLQYGSFCTQLNRALTGIAVEQDKNTQEVFAQVKQIYKTPPIKDFGGFNFSQILPDPSKPSKRSFIEDLLFNKVTLADAGFIKQYGDCLGDIAARDLICAQKFNGLTVLPPLLTDEMIAQYTSALLAGTITSGWTFGAGAALQIPFAMQMAYRFNGIGVTQNVLYENQKLIANQFNSAIGKIQDSLSSGASALGKLQDVVNQNAQALNTLVKQLSSNFGAISSVLNDILSRLDKVEAEVQIDRLITGRLQSLQTYVTQQLIRAAEIRASANLAATKMSECVLGQSKRVDFCGKGYHLMSFPQSAPHGVVFLHVTYVPAQEKNFTTAPAICHDGKAHFPREGVFVSNGTHWFVTQRNFYEPQIITTDNTFVSGNCDVVIGIVNNTVYDPLQPELDSFKEELDKYFKNHTSPDVDLGDISGINASVVNIQKEIDRLNEVAKNLNESLIDLQELGKYEQ

SEQ ID NO: 93 - protein, 1208 aa, Artificial Sequence
  source: /note="Description of Artificial Sequence: Synthetic polypeptide"
MFVFLVLLPLVSSQCVNLTTRTQLPPAYTNSFTRGVYYPDKVFRSSVLHSTQDLFLPFFSNVTWFHAIHVSGTNGTKRFDNPVLPFNDGVYFASTEKSNIIRGWIFGTTLDSKTQSLLIVNNATNVVIKVCEFQFCNDPFLGVYYHKNNKSWMESEFRVYSSANNCTFEYVSQPFLMDLEGKQGNFKNLREFVFKNIDGYFKIYSKHTPINLVRDLPQGFSALEPLVDLPIGINITRFQTLLALHRSYLTPGDSSSGWTAGAAAYYVGYLQPRTFLLKYNENGTITDAVDCALDPLSETKCTLKSFTVEKGIYQTSNFRVQPTESIVRFPNITNLCPFGEVFNATRFASVYAWNRKRISNCVADYSVLYNSASFSTFKCYGVSPTKLNDLCFTNVYADSFVIRGDEVRQIAPGQTGKIADYNYKLPDDFTGCVIAWNSNNLDSKVGGNYNYLYRLFRKSNLKPFERDISTEIYQAGSTPCNGVEGFNCYFPLQSYGFQPTNGVGYQPYRVVVLSFELLHAPATVCGPKKSTNLVKNKCVNFNFNGLTGTGVLTESNKKFLPFQQFGRDIADTTDAVRDPQTLEILDITPCSFGGVSVITPGTNTSNQVAVLYQDVNCTEVPVAIHADQLTPTWRVYSTGSNVFQTRAGCLIGAEHVNNSYECDIPIGAGICASYQTQTNSPSRAGSVASQSIIAYTMSLGAENSVAYSNNSIAIPTNFTISVTTEILPVSMTKTSVDCTMYICGDSTECSNLLLQYGSFCTQLNRALTGIAVEQDKNTQEVFAQVKQIYKTPPIKDFGGFNFSQILPDPSKPSKRSFIEDLLFNKVTLADAGFIKQYGDCLGDIAARDLICAQKFNGLTVLPPLLTDEMIAQYTSALLAGTITSGWTFGAGAALQIPFAMQMAYRFNGIGVTQNVLYENQKLIANQFNSAIGKIQDSLSSTAGALGKLQDVVNQNAQALNTLVKQLSSNFGAISSVLNDILSRLDKVEAEVQIDRLITGRLQSLQTYVTQQLIRAAEIRASANLAATKMSECVLGQSKRVDFCGKGYHLMSFPQSAPHGVVFLHVTYVPAQEKNFTTAPAICHDGKAHFPREGVFVSNGTHWFVTQRNFYEPQIITTDNTFVSGNCDVVIGIVNNTVYDPLQPELDSFKEELDKYFKNHTSPDVDLGDISGINASVVNIQKEIDRLNEVAKNLNESLIDLQELGKYEQ

SEQ ID NO: 94 - protein, 1208 aa, Artificial Sequence
  source: /note="Description of Artificial Sequence: Synthetic polypeptide"
MFVFLVLLPLVSSQCVNLTTRTQLPPAYTNSFTRGVYYPDKVFRSSVLHSTQDLFLPFFSNVTWFHAIHVSGTNGTKRFDNPVLPFNDGVYFASTEKSNIIRGWIFGTTLDSKTQSLLIVNNATNVVIKVCEFQFCNDPFLGVYYHKNNKSWMESEFRVYSSANNCTFEYVSQPFLMDLEGKQGNFKNLREFVFKNIDGYFKIYSKHTPINLVRDLPQGFSALEPLVDLPIGINITRFQTLLALHRSYLTPGDSSSGWTAGAAAYYVGYLQPRTFLLKYNENGTITDAVDCALDPLSETKCTLKSFTVEKGIYQTSNFRVQPTESIVRFPNITNLCPFGEVFNATRFASVYAWNRKRISNCVADYSVLYNSASFSTFKCYGVSPTKLNDLCFTNVYADSFVIRGDEVRQIAPGQTGKIADYNYKLPDDFTGCVIAWNSNNLDSKVGGNYNYLYRLFRKSNLKPFERDISTEIYQAGSTPCNGVEGFNCYFPLQSYGFQPTNGVGYQPYRVVVLSFELLHAPATVCGPKKSTNLVKNKCVNFNFNGLTGTGVLTESNKKFLPFQQFGRDIADTTDAVRDPQTLEILDITPCSFGGVSVITPGTNTSNQVAVLYQNVNCTEVPVAIHADQLTPTWRVYSTGSNVFQTRAGCLIGAEHVNNSYECDIPIGAGICASYQTQTNSPSRAGSVASQSIIAYTMSLGAENSVAYSNNSIAIPTNFTISVTTEILPVSMTKTSVDCTMYICGDSTECSNLLLQYGSFCTQLNRALTGIAVEQDKNTQEVFAQVKQIYKTPPIKDFGGFNFSQILPDPSKPSKRSFIEDLLFNKVTLADAGFIKQYGDCLGDIAARDLICAQKFNGLTVLPPLLTDEMIAQYTSALLAGTITSGWTFGAGPALQIPFAMQMAYRFNGIGVTQNVLYENQKLIANQFNSAIGKIQDSLSSGPSALGKLQDVVNQNAQALNTLVKQLSSNFGAISSVLNDILSRLDKVEAEVQIDRLITGRLQSLQTYVTQQLIRAAEIRASANLAATKMSECVLGQSKRVDFCGKGYHLMSFPQSAPHGVVFLHVTYVPAQEKNFTTAPAICHDGKAHFPREGVFVSNGTHWFVTQRNFYEPQIITTDNTFVSGNCDVVIGIVNNTVYDPLQPELDSFKEELDKYFKNHTSPDVDLGDISGINASVVNIQKEIDRLNEVAKNLNESLIDLQELGKYEQ

SEQ ID NO: 95 - protein, 1208 aa, Artificial Sequence
  source: /note="Description of Artificial Sequence: Synthetic polypeptide"
MFVFLVLLPLVSSQCVNLTTRTQLPPAYTNSFTRGVYYPDKVFRSSVLHSTQDLFLPFFSNVTWFHAIHVSGTNGTKRFDNPVLPFNDGVYFASTEKSNIIRGWIFGTTLDSKTQSLLIVNNATNVVIKVCEFQFCNDPFLGVYYHKNNKSWMESEFRVYSSANNCTFEYVSQPFLMDLEGKQGNFKNLREFVFKNIDGYFKIYSKHTPINLVRDLPQGFSALEPLVDLPIGINITRFQTLLALHRSYLTPGDSSSGWTAGAAAYYVGYLQPRTFLLKYNENGTITDAVDCALDPLSETKCTLKSFTVEKGIYQTSNFRVQPTESIVRFPNITNLCPFGEVFNATRFASVYAWNRKRISNCVADYSVLYNSASFSTFKCYGVSPTKLNDLCFTNVYADSFVIRGDEVRQIAPGQTGKIADYNYKLPDDFTGCVIAWNSNNLDSKVGGNYNYLYRLFRKSNLKPFERDISTEIYQAGSTPCNGVEGFNCYFPLQSYGFQPTNGVGYQPYRVVVLSFELLHAPATVCGPKKSTNLVKNKCVNFNFNGLTGTGVLTESNKKFLPFQQFGRDIADTTDAVRDPQTLEILDITPCSFGGVSVITPGTNTSNQVAVLYQNVNCTEVPVAIHADQLTPTWRVYSTGSNVFQTRAGCLIGAEHVNNSYECDIPIGAGICASYQTQTNSPSRAGSVASQSIIAYTMSLGAENSVAYSNNSIAIPTNFTISVTTEILPVSMTKTSVDCTMYICGDSTECSNLLLQYGSFCTQLNRALTGIAVEQDKNTQEVFAQVKQIYKTPPIKDFGGFNFSQILPDPSKPSKRSFIEDLLFNKVTLADAGFIKQYGDCLGDIAARDLICAQKFNGLTVLPPLLTDEMIAQYTSALLAGTITSGWTFGAGPALQIPFAMQMAYRFNGIGVTQNVLYENQKLIANQFNSAIGKIQDSLSSTPGALGKLQDVVNQNAQALNTLVKQLSSNFGAISSVLNDILSRLDKVEAEVQIDRLITGRLQSLQTYVTQQLIRAAEIRASANLAATKMSECVLGQSKRVDFCGKGYHLMSFPQSAPHGVVFLHVTYVPAQEKNFTTAPAICHDGKAHFPREGVFVSNGTHWFVTQRNFYEPQIITTDNTFVSGNCDVVIGIVNNTVYDPLQPELDSFKEELDKYFKNHTSPDVDLGDISGINASVVNIQKEIDRLNEVAKNLNESLIDLQELGKYEQ

SEQ ID NO: 96 - protein, 1208 aa, Artificial Sequence
  source: /note="Description of Artificial Sequence: Synthetic polypeptide"
MFVFLVLLPLVSSQCVNLTTRTQLPPAYTNSFTRGVYYPDKVFRSSVLHSTQDLFLPFFSNVTWFHAIHVSGTNGTKRFDNPVLPFNDGVYFASTEKSNIIRGWIFGTTLDSKTQSLLIVNNATNVVIKVCEFQFCNDPFLGVYYHKNNKSWMESEFRVYSSANNCTFEYVSQPFLMDLEGKQGNFKNLREFVFKNIDGYFKIYSKHTPINLVRDLPQGFSALEPLVDLPIGINITRFQTLLALHRSYLTPGDSSSGWTAGAAAYYVGYLQPRTFLLKYNENGTITDAVDCALDPLSETKCTLKSFTVEKGIYQTSNFRVQPTESIVRFPNITNLCPFGEVFNATRFASVYAWNRKRISNCVADYSVLYNSASFSTFKCYGVSPTKLNDLCFTNVYADSFVIRGDEVRQIAPGQTGKIADYNYKLPDDFTGCVIAWNSNNLDSKVGGNYNYLYRLFRKSNLKPFERDISTEIYQAGSTPCNGVEGFNCYFPLQSYGFQPTNGVGYQPYRVVVLSFELLHAPATVCGPKKSTNLVKNKCVNFNFNGLTGTGVLTESNKKFLPFQQFGRDIADTTDAVRDPQTLEILDITPCSFGGVSVITPGTNTSNQVAVLYQNVNCTEVPVAIHADQLTPTWRVYSTGSNVFQTRAGCLIGAEHVNNSYECDIPIGAGICASYQTQTNSPSRAGSVASQSIIAYTMSLGAENSVAYSNNSIAIPTNFTISVTTEILPVSMTKTSVDCTMYICGDSTECSNLLLQYGSFCTQLNRALTGIAVEQDKNTQEVFAQVKQIYKTPPIKDFGGFNFSQILPDPSKPSKRSFIEDLLFNKVTLADAGFIKQYGDCLGDIAARDLICAQKFNGLTVLPPLLTDEMIAQYTSALLAGTITSGWTFGAGPALQIPFAMQMAYRFNGIGVTQNVLYENQKLIANQFNSAIGKIQDSLSSGPGALGKLQDVVNQNAQALNTLVKQLSSNFGAISSVLNDILSRLDKVEAEVQIDRLITGRLQSLQTYVTQQLIRAAEIRASANLAATKMSECVLGQSKRVDFCGKGYHLMSFPQSAPHGVVFLHVTYVPAQEKNFTTAPAICHDGKAHFPREGVFVSNGTHWFVTQRNFYEPQIITTDNTFVSGNCDVVIGIVNNTVYDPLQPELDSFKEELDKYFKNHTSPDVDLGDISGINASVVNIQKEIDRLNEVAKNLNESLIDLQELGKYEQ

SEQ ID NO: 97 - protein, 1208 aa, Artificial Sequence
  source: /note="Description of Artificial Sequence: Synthetic polypeptide"
MFVFLVLLPLVSSQCVNLTTRTQLPPAYTNSFTRGVYYPDKVFRSSVLHSTQDLFLPFFSNVTWFHAIHVSGTNGTKRFDNPVLPFNDGVYFASTEKSNIIRGWIFGTTLDSKTQSLLIVNNATNVVIKVCEFQFCNDPFLGVYYHKNNKSWMESEFRVYSSANNCTFEYVSQPFLMDLEGKQGNFKNLREFVFKNIDGYFKIYSKHTPINLVRDLPQGFSALEPLVDLPIGINITRFQTLLALHRSYLTPGDSSSGWTAGAAAYYVGYLQPRTFLLKYNENGTITDAVDCALDPLSETKCTLKSFTVEKGIYQTSNFRVQPTESIVRFPNITNLCPFGEVFNATRFASVYAWNRKRISNCVADYSVLYNSASFSTFKCYGVSPTKLNDLCFTNVYADSFVIRGDEVRQIAPGQTGKIADYNYKLPDDFTGCVIAWNSNNLDSKVGGNYNYLYRLFRKSNLKPFERDISTEIYQAGSTPCNGVEGFNCYFPLQSYGFQPTNGVGYQPYRVVVLSFELLHAPATVCGPKKSTNLVKNKCVNFNFNGLTGTGVLTESNKKFLPFQQFGRDIADTTDAVRDPQTLEILDITPCSFGGVSVITPGTNTSNQVAVLYQNVNCTEVPVAIHADQLTPTWRVYSTGSNVFQTRAGCLIGAEHVNNSYECDIPIGAGICASYQTQTNSPSRAGSVASQSIIAYTMSLGAENSVAYSNNSIAIPTNFTISVTTEILPVSMTKTSVDCTMYICGDSTECSNLLLQYGSFCTQLNRALTGIAVEQDKNTQEVFAQVKQIYKTPPIKDFGGFNFSQILPDPSKPSKRSFIEDLLFNKVTLADAGFIKQYGDCLGDIAARDLICAQKFNGLTVLPPLLTDEMIAQYTSALLAGTITSGWTFGAGPALQIPFAMQMAYRFNGIGVTQNVLYENQKLIANQFNSAIGKIQDSLSSGPSPLGKLQDVVNQNAQALNTLVKQLSSNFGAISSVLNDILSRLDKVEAEVQIDRLITGRLQSLQTYVTQQLIRAAEIRASANLAATKMSECVLGQSKRVDFCGKGYHLMSFPQSAPHGVVFLHVTYVPAQEKNFTTAPAICHDGKAHFPREGVFVSNGTHWFVTQRNFYEPQIITTDNTFVSGNCDVVIGIVNNTVYDPLQPELDSFKEELDKYFKNHTSPDVDLGDISGINASVVNIQKEIDRLNEVAKNLNESLIDLQELGKYEQ

SEQ ID NO: 98 - protein, 1208 aa, Artificial Sequence
  source: /note="Description of Artificial Sequence: Synthetic polypeptide"
MFVFLVLLPLVSSQCVNLTTRTQLPPAYTNSFTRGVYYPDKVFRSSVLHSTQDLFLPFFSNVTWFHAIHVSGTNGTKRFDNPVLPFNDGVYFASTEKSNIIRGWIFGTTLDSKTQSLLIVNNATNVVIKVCEFQFCNDPFLGVYYHKNNKSWMESEFRVYSSANNCTFEYVSQPFLMDLEGKQGNFKNLREFVFKNIDGYFKIYSKHTPINLVRDLPQGFSALEPLVDLPIGINITRFQTLLALHRSYLTPGDSSSGWTAGAAAYYVGYLQPRTFLLKYNENGTITDAVDCALDPLSETKCTLKSFTVEKGIYQTSNFRVQPTESIVRFPNITNLCPFGEVFNATRFASVYAWNRKRISNCVADYSVLYNSASFSTFKCYGVSPTKLNDLCFTNVYADSFVIRGDEVRQIAPGQTGKIADYNYKLPDDFTGCVIAWNSNNLDSKVGGNYNYLYRLFRKSNLKPFERDISTEIYQAGSTPCNGVEGFNCYFPLQSYGFQPTNGVGYQPYRVVVLSFELLHAPATVCGPKKSTNLVKNKCVNFNFNGLTGTGVLTESNKKFLPFQQFGRDIADTTDAVRDPQTLEILDITPCSFGGVSVITPGTNTSNQVAVLYQNVNCTEVPVAIHADQLTPTWRVYSTGSNVFQTRAGCLIGAEHVNNSYECDIPIGAGICASYQTQTNSPSRAGSVASQSIIAYTMSLGAENSVAYSNNSIAIPTNFTISVTTEILPVSMTKTSVDCTMYICGDSTECSNLLLQYGSFCTQLNRALTGIAVEQDKNTQEVFAQVKQIYKTPPIKDFGGFNFSQILPDPSKPSKRSFIEDLLFNKVTLADAGFIKQYGDCLGDIAARDLICAQKFNGLTVLPPLLTDEMIAQYTSALLAGTITSGWTFGAGPALQIPFAMQMAYRFNGIGVTQNVLYENQKLIANQFNSAIGKIQDSLSSTPGPLGKLQDVVNQNAQALNTLVKQLSSNFGAISSVLNDILSRLDKVEAEVQIDRLITGRLQSLQTYVTQQLIRAAEIRASANLAATKMSECVLGQSKRVDFCGKGYHLMSFPQSAPHGVVFLHVTYVPAQEKNFTTAPAICHDGKAHFPREGVFVSNGTHWFVTQRNFYEPQIITTDNTFVSGNCDVVIGIVNNTVYDPLQPELDSFKEELDKYFKNHTSPDVDLGDISGINASVVNIQKEIDRLNEVAKNLNESLIDLQELGKYEQ

SEQ ID NO: 99 - protein, 1208 aa, Artificial Sequence
  source: /note="Description of Artificial Sequence: Synthetic polypeptide"
MFVFLVLLPLVSSQCVNLTTRTQLPPAYTNSFTRGVYYPDKVFRSSVLHSTQDLFLPFFSNVTWFHAIHVSGTNGTKRFDNPVLPFNDGVYFASTEKSNIIRGWIFGTTLDSKTQSLLIVNNATNVVIKVCEFQFCNDPFLGVYYHKNNKSWMESEFRVYSSANNCTFEYVSQPFLMDLEGKQGNFKNLREFVFKNIDGYFKIYSKHTPINLVRDLPQGFSALEPLVDLPIGINITRFQTLLALHRSYLTPGDSSSGWTAGAAAYYVGYLQPRTFLLKYNENGTITDAVDCALDPLSETKCTLKSFTVEKGIYQTSNFRVQPTESIVRFPNITNLCPFGEVFNATRFASVYAWNRKRISNCVADYSVLYNSASFSTFKCYGVSPTKLNDLCFTNVYADSFVIRGDEVRQIAPGQTGKIADYNYKLPDDFTGCVIAWNSNNLDSKVGGNYNYLYRLFRKSNLKPFERDISTEIYQAGSTPCNGVEGFNCYFPLQSYGFQPTNGVGYQPYRVVVLSFELLHAPATVCGPKKSTNLVKNKCVNFNFNGLTGTGVLTESNKKFLPFQQFGRDIADTTDAVRDPQTLEILDITPCSFGGVSVITPGTNTSNQVAVLYQDVNCTEVPVAIHADQLTPTWRVYSTGSNVFQTRAGCLIGAEHVNNSYECDIPIGAGICASYQTQTNSPSRAGSVASQSIIAYTMSLGAENSVAYSNNSIAIPTNFTISVTTEILPVSMTKTSVDCTMYICGDSTECSNLLLQYGSFCTQLNRALTGIAVEQDKNTQEVFAQVKQIYKTPPIKDFGGFNFSQILPDPSKPSKRSFIEDLLFNKVTLADAGFIKQYGDCLGDIAARDLICAQKFNGLTVLPPLLTDEMIAQYTSALLAGTITSGWTFGAGAALQIPFAMQMAYRFNGIGVTQNVLYENQKLIANQFNSAIGKIQDSLSSGASALGKLQDVVNQNAQALNTLVKQLSSNFGAISSVLNDILSRLDPVEAEVQIDRLITGRLQSLQTYVTQQLIRAAEIRASANLAATKMSECVLGQSKRVDFCGKGYHLMSFPQSAPHGVVFLHVTYVPAQEKNFTTAPAICHDGKAHFPREGVFVSNGTHWFVTQRNFYEPQIITTDNTFVSGNCDVVIGIVNNTVYDPLQPELDSFKEELDKYFKNHTSPDVDLGDISGINASVVNIQKEIDRLNEVAKNLNESLIDLQELGKYEQ

SEQ ID NO: 100 - protein, 1208 aa, Artificial Sequence
  source: /note="Description of Artificial Sequence: Synthetic polypeptide"
MFVFLVLLPLVSSQCVNLTTRTQLPPAYTNSFTRGVYYPDKVFRSSVLHSTQDLFLPFFSNVTWFHAIHVSGTNGTKRFDNPVLPFNDGVYFASTEKSNIIRGWIFGTTLDSKTQSLLIVNNATNVVIKVCEFQFCNDPFLGVYYHKNNKSWMESEFRVYSSANNCTFEYVSQPFLMDLEGKQGNFKNLREFVFKNIDGYFKIYSKHTPINLVRDLPQGFSALEPLVDLPIGINITRFQTLLALHRSYLTPGDSSSGWTAGAAAYYVGYLQPRTFLLKYNENGTITDAVDCALDPLSETKCTLKSFTVEKGIYQTSNFRVQPTESIVRFPNITNLCPFGEVFNATRFASVYAWNRKRISNCVADYSVLYNSASFSTFKCYGVSPTKLNDLCFTNVYADSFVIRGDEVRQIAPGQTGKIADYNYKLPDDFTGCVIAWNSNNLDSKVGGNYNYLYRLFRKSNLKPFERDISTEIYQAGSTPCNGVEGFNCYFPLQSYGFQPTNGVGYQPYRVVVLSFELLHAPATVCGPKKSTNLVKNKCVNFNFNGLTGTGVLTESNKKFLPFQQFGRDIADTTDAVRDPQTLEILDITPCSFGGVSVITPGTNTSNQVAVLYQDVNCTEVPVAIHADQLTPTWRVYSTGSNVFQTRAGCLIGAEHVNNSYECDIPIGAGICASYQTQTNSPSRAGSVASQSIIAYTMSLGAENSVAYSNNSIAIPTNFTISVTTEILPVSMTKTSVDCTMYICGDSTECSNLLLQYGSFCTQLNRALTGIAVEQDKNTQEVFAQVKQIYKTPPIKDFGGFNFSQILPDPSKPSKRSFIEDLLFNKVTLADAGFIKQYGDCLGDIAARDLICAQKFNGLTVLPPLLTDEMIAQYTSALLAGTITSGWTFGAGAALQIPFAMQMAYRFNGIGVTQNVLYENQKLIANQFNSAIGKIQDSLSSTAGALGKLQDVVNQNAQALNTLVKQLSSNFGAISSVLNDILSRLDPVEAEVQIDRLITGRLQSLQTYVTQQLIRAAEIRASANLAATKMSECVLGQSKRVDFCGKGYHLMSFPQSAPHGVVFLHVTYVPAQEKNFTTAPAICHDGKAHFPREGVFVSNGTHWFVTQRNFYEPQIITTDNTFVSGNCDVVIGIVNNTVYDPLQPELDSFKEELDKYFKNHTSPDVDLGDISGINASVVNIQKEIDRLNEVAKNLNESLIDLQELGKYEQ

SEQ ID NO: 101 - protein, 1208 aa, Artificial Sequence
  source: /note="Description of Artificial Sequence: Synthetic polypeptide"
MFVFLVLLPLVSSQCVNLTTRTQLPPAYTNSFTRGVYYPDKVFRSSVLHSTQDLFLPFFSNVTWFHAIHVSGTNGTKRFDNPVLPFNDGVYFASTEKSNIIRGWIFGTTLDSKTQSLLIVNNATNVVIKVCEFQFCNDPFLGVYYHKNNKSWMESEFRVYSSANNCTFEYVSQPFLMDLEGKQGNFKNLREFVFKNIDGYFKIYSKHTPINLVRDLPQGFSALEPLVDLPIGINITRFQTLLALHRSYLTPGDSSSGWTAGAAAYYVGYLQPRTFLLKYNENGTITDAVDCALDPLSETKCTLKSFTVEKGIYQTSNFRVQPTESIVRFPNITNLCPFGEVFNATRFASVYAWNRKRISNCVADYSVLYNSASFSTFKCYGVSPTKLNDLCFTNVYADSFVIRGDEVRQIAPGQTGKIADYNYKLPDDFTGCVIAWNSNNLDSKVGGNYNYLYRLFRKSNLKPFERDISTEIYQAGSTPCNGVEGFNCYFPLQSYGFQPTNGVGYQPYRVVVLSFELLHAPATVCGPKKSTNLVKNKCVNFNFNGLTGTGVLTESNKKFLPFQQFGRDIADTTDAVRDPQTLEILDITPCSFGGVSVITPGTNTSNQVAVLYQNVNCTEVPVAIHADQLTPTWRVYSTGSNVFQTRAGCLIGAEHVNNSYECDIPIGAGICASYQTQTNSPSRAGSVASQSIIAYTMSLGAENSVAYSNNSIAIPTNFTISVTTEILPVSMTKTSVDCTMYICGDSTECSNLLLQYGSFCTQLNRALTGIAVEQDKNTQEVFAQVKQIYKTPPIKDFGGFNFSQILPDPSKPSKRSFIEDLLFNKVTLADAGFIKQYGDCLGDIAARDLICAQKFNGLTVLPPLLTDEMIAQYTSALLAGTITSGWTFGAGPALQIPFAMQMAYRFNGIGVTQNVLYENQKLIANQFNSAIGKIQDSLSSGPSALGKLQDVVNQNAQALNTLVKQLSSNFGAISSVLNDILSRLDPVEAEVQIDRLITGRLQSLQTYVTQQLIRAAEIRASANLAATKMSECVLGQSKRVDFCGKGYHLMSFPQSAPHGVVFLHVTYVPAQEKNFTTAPAICHDGKAHFPREGVFVSNGTHWFVTQRNFYEPQIITTDNTFVSGNCDVVIGIVNNTVYDPLQPELDSFKEELDKYFKNHTSPDVDLGDISGINASVVNIQKEIDRLNEVAKNLNESLIDLQELGKYEQ

SEQ ID NO: 102 - protein, 1208 aa, Artificial Sequence
  source: /note="Description of Artificial Sequence: Synthetic polypeptide"
MFVFLVLLPLVSSQCVNLTTRTQLPPAYTNSFTRGVYYPDKVFRSSVLHSTQDLFLPFFSNVTWFHAIHVSGTNGTKRFDNPVLPFNDGVYFASTEKSNIIRGWIFGTTLDSKTQSLLIVNNATNVVIKVCEFQFCNDPFLGVYYHKNNKSWMESEFRVYSSANNCTFEYVSQPFLMDLEGKQGNFKNLREFVFKNIDGYFKIYSKHTPINLVRDLPQGFSALEPLVDLPIGINITRFQTLLALHRSYLTPGDSSSGWTAGAAAYYVGYLQPRTFLLKYNENGTITDAVDCALDPLSETKCTLKSFTVEKGIYQTSNFRVQPTESIVRFPNITNLCPFGEVFNATRFASVYAWNRKRISNCVADYSVLYNSASFSTFKCYGVSPTKLNDLCFTNVYADSFVIRGDEVRQIAPGQTGKIADYNYKLPDDFTGCVIAWNSNNLDSKVGGNYNYLYRLFRKSNLKPFERDISTEIYQAGSTPCNGVEGFNCYFPLQSYGFQPTNGVGYQPYRVVVLSFELLHAPATVCGPKKSTNLVKNKCVNFNFNGLTGTGVLTESNKKFLPFQQFGRDIADTTDAVRDPQTLEILDITPCSFGGVSVITPGTNTSNQVAVLYQNVNCTEVPVAIHADQLTPTWRVYSTGSNVFQTRAGCLIGAEHVNNSYECDIPIGAGICASYQTQTNSPSRAGSVASQSIIAYTMSLGAENSVAYSNNSIAIPTNFTISVTTEILPVSMTKTSVDCTMYICGDSTECSNLLLQYGSFCTQLNRALTGIAVEQDKNTQEVFAQVKQIYKTPPIKDFGGFNFSQILPDPSKPSKRSFIEDLLFNKVTLADAGFIKQYGDCLGDIAARDLICAQKFNGLTVLPPLLTDEMIAQYTSALLAGTITSGWTFGAGPALQIPFAMQMAYRFNGIGVTQNVLYENQKLIANQFNSAIGKIQDSLSSTPGALGKLQDVVNQNAQALNTLVKQLSSNFGAISSVLNDILSRLDPVEAEVQIDRLITGRLQSLQTYVTQQLIRAAEIRASANLAATKMSECVLGQSKRVDFCGKGYHLMSFPQSAPHGVVFLHVTYVPAQEKNFTTAPAICHDGKAHFPREGVFVSNGTHWFVTQRNFYEPQIITTDNTFVSGNCDVVIGIVNNTVYDPLQPELDSFKEELDKYFKNHTSPDVDLGDISGINASVVNIQKEIDRLNEVAKNLNESLIDLQELGKYEQ

SEQ ID NO: 103 - protein, 1208 aa, Artificial Sequence
  source: /note="Description of Artificial Sequence: Synthetic polypeptide"
MFVFLVLLPLVSSQCVNLTTRTQLPPAYTNSFTRGVYYPDKVFRSSVLHSTQDLFLPFFSNVTWFHAIHVSGTNGTKRFDNPVLPFNDGVYFASTEKSNIIRGWIFGTTLDSKTQSLLIVNNATNVVIKVCEFQFCNDPFLGVYYHKNNKSWMESEFRVYSSANNCTFEYVSQPFLMDLEGKQGNFKNLREFVFKNIDGYFKIYSKHTPINLVRDLPQGFSALEPLVDLPIGINITRFQTLLALHRSYLTPGDSSSGWTAGAAAYYVGYLQPRTFLLKYNENGTITDAVDCALDPLSETKCTLKSFTVEKGIYQTSNFRVQPTESIVRFPNITNLCPFGEVFNATRFASVYAWNRKRISNCVADYSVLYNSASFSTFKCYGVSPTKLNDLCFTNVYADSFVIRGDEVRQIAPGQTGKIADYNYKLPDDFTGCVIAWNSNNLDSKVGGNYNYLYRLFRKSNLKPFERDISTEIYQAGSTPCNGVEGFNCYFPLQSYGFQPTNGVGYQPYRVVVLSFELLHAPATVCGPKKSTNLVKNKCVNFNFNGLTGTGVLTESNKKFLPFQQFGRDIADTTDAVRDPQTLEILDITPCSFGGVSVITPGTNTSNQVAVLYQNVNCTEVPVAIHADQLTPTWRVYSTGSNVFQTRAGCLIGAEHVNNSYECDIPIGAGICASYQTQTNSPSRAGSVASQSIIAYTMSLGAENSVAYSNNSIAIPTNFTISVTTEILPVSMTKTSVDCTMYICGDSTECSNLLLQYGSFCTQLNRALTGIAVEQDKNTQEVFAQVKQIYKTPPIKDFGGFNFSQILPDPSKPSKRSFIEDLLFNKVTLADAGFIKQYGDCLGDIAARDLICAQKFNGLTVLPPLLTDEMIAQYTSALLAGTITSGWTFGAGPALQIPFAMQMAYRFNGIGVTQNVLYENQKLIANQFNSAIGKIQDSLSSGPGALGKLQDVVNQNAQALNTLVKQLSSNFGAISSVLNDILSRLDPVEAEVQIDRLITGRLQSLQTYVTQQLIRAAEIRASANLAATKMSECVLGQSKRVDFCGKGYHLMSFPQSAPHGVVFLHVTYVPAQEKNFTTAPAICHDGKAHFPREGVFVSNGTHWFVTQRNFYEPQIITTDNTFVSGNCDVVIGIVNNTVYDPLQPELDSFKEELDKYFKNHTSPDVDLGDISGINASVVNIQKEIDRLNEVAKNLNESLIDLQELGKYEQ

SEQ ID NO: 104 - protein, 1208 aa, Artificial Sequence
  source: /note="Description of Artificial Sequence: Synthetic polypeptide"
MFVFLVLLPLVSSQCVNLTTRTQLPPAYTNSFTRGVYYPDKVFRSSVLHSTQDLFLPFFSNVTWFHAIHVSGTNGTKRFDNPVLPFNDGVYFASTEKSNIIRGWIFGTTLDSKTQSLLIVNNATNVVIKVCEFQFCNDPFLGVYYHKNNKSWMESEFRVYSSANNCTFEYVSQPFLMDLEGKQGNFKNLREFVFKNIDGYFKIYSKHTPINLVRDLPQGFSALEPLVDLPIGINITRFQTLLALHRSYLTPGDSSSGWTAGAAAYYVGYLQPRTFLLKYNENGTITDAVDCALDPLSETKCTLKSFTVEKGIYQTSNFRVQPTESIVRFPNITNLCPFGEVFNATRFASVYAWNRKRISNCVADYSVLYNSASFSTFKCYGVSPTKLNDLCFTNVYADSFVIRGDEVRQIAPGQTGKIADYNYKLPDDFTGCVIAWNSNNLDSKVGGNYNYLYRLFRKSNLKPFERDISTEIYQAGSTPCNGVEGFNCYFPLQSYGFQPTNGVGYQPYRVVVLSFELLHAPATVCGPKKSTNLVKNKCVNFNFNGLTGTGVLTESNKKFLPFQQFGRDIADTTDAVRDPQTLEILDITPCSFGGVSVITPGTNTSNQVAVLYQNVNCTEVPVAIHADQLTPTWRVYSTGSNVFQTRAGCLIGAEHVNNSYECDIPIGAGICASYQTQTNSPSRAGSVASQSIIAYTMSLGAENSVAYSNNSIAIPTNFTISVTTEILPVSMTKTSVDCTMYICGDSTECSNLLLQYGSFCTQLNRALTGIAVEQDKNTQEVFAQVKQIYKTPPIKDFGGFNFSQILPDPSKPSKRSFIEDLLFNKVTLADAGFIKQYGDCLGDIAARDLICAQKFNGLTVLPPLLTDEMIAQYTSALLAGTITSGWTFGAGPALQIPFAMQMAYRFNGIGVTQNVLYENQKLIANQFNSAIGKIQDSLSSGPSPLGKLQDVVNQNAQALNTLVKQLSSNFGAISSVLNDILSRLDPVEAEVQIDRLITGRLQSLQTYVTQQLIRAAEIRASANLAATKMSECVLGQSKRVDFCGKGYHLMSFPQSAPHGVVFLHVTYVPAQEKNFTTAPAICHDGKAHFPREGVFVSNGTHWFVTQRNFYEPQIITTDNTFVSGNCDVVIGIVNNTVYDPLQPELDSFKEELDKYFKNHTSPDVDLGDISGINASVVNIQKEIDRLNEVAKNLNESLIDLQELGKYEQ

SEQ ID NO: 105 - protein, 1208 aa, Artificial Sequence
  source: /note="Description of Artificial Sequence: Synthetic polypeptide"
MFVFLVLLPLVSSQCVNLTTRTQLPPAYTNSFTRGVYYPDKVFRSSVLHSTQDLFLPFFSNVTWFHAIHVSGTNGTKRFDNPVLPFNDGVYFASTEKSNIIRGWIFGTTLDSKTQSLLIVNNATNVVIKVCEFQFCNDPFLGVYYHKNNKSWMESEFRVYSSANNCTFEYVSQPFLMDLEGKQGNFKNLREFVFKNIDGYFKIYSKHTPINLVRDLPQGFSALEPLVDLPIGINITRFQTLLALHRSYLTPGDSSSGWTAGAAAYYVGYLQPRTFLLKYNENGTITDAVDCALDPLSETKCTLKSFTVEKGIYQTSNFRVQPTESIVRFPNITNLCPFGEVFNATRFASVYAWNRKRISNCVADYSVLYNSASFSTFKCYGVSPTKLNDLCFTNVYADSFVIRGDEVRQIAPGQTGKIADYNYKLPDDFTGCVIAWNSNNLDSKVGGNYNYLYRLFRKSNLKPFERDISTEIYQAGSTPCNGVEGFNCYFPLQSYGFQPTNGVGYQPYRVVVLSFELLHAPATVCGPKKSTNLVKNKCVNFNFNGLTGTGVLTESNKKFLPFQQFGRDIADTTDAVRDPQTLEILDITPCSFGGVSVITPGTNTSNQVAVLYQNVNCTEVPVAIHADQLTPTWRVYSTGSNVFQTRAGCLIGAEHVNNSYECDIPIGAGICASYQTQTNSPSRAGSVASQSIIAYTMSLGAENSVAYSNNSIAIPTNFTISVTTEILPVSMTKTSVDCTMYICGDSTECSNLLLQYGSFCTQLNRALTGIAVEQDKNTQEVFAQVKQIYKTPPIKDFGGFNFSQILPDPSKPSKRSFIEDLLFNKVTLADAGFIKQYGDCLGDIAARDLICAQKFNGLTVLPPLLTDEMIAQYTSALLAGTITSGWTFGAGPALQIPFAMQMAYRFNGIGVTQNVLYENQKLIANQFNSAIGKIQDSLSSTPGPLGKLQDVVNQNAQALNTLVKQLSSNFGAISSVLNDILSRLDPVEAEVQIDRLITGRLQSLQTYVTQQLIRAAEIRASANLAATKMSECVLGQSKRVDFCGKGYHLMSFPQSAPHGVVFLHVTYVPAQEKNFTTAPAICHDGKAHFPREGVFVSNGTHWFVTQRNFYEPQIITTDNTFVSGNCDVVIGIVNNTVYDPLQPELDSFKEELDKYFKNHTSPDVDLGDISGINASVVNIQKEIDRLNEVAKNLNESLIDLQELGKYEQ

SEQ ID NO: 106 - protein, 1208 aa, Artificial Sequence
  source: /note="Description of Artificial Sequence: Synthetic polypeptide"
MFVFLVLLPLVSSQCVNLTTRTQLPPAYTNSFTRGVYYPDKVFRSSVLHSTQDLFLPFFSNVTWFHAIHVSGTNGTKRFDNPVLPFNDGVYFASTEKSNIIRGWIFGTTLDSKTQSLLIVNNATNVVIKVCEFQFCNDPFLGVYYHKNNKSWMESEFRVYSSANNCTFEYVSQPFLMDLEGKQGNFKNLREFVFKNIDGYFKIYSKHTPINLVRDLPQGFSALEPLVDLPIGINITRFQTLLALHRSYLTPGDSSSGWTAGAAAYYVGYLQPRTFLLKYNENGTITDAVDCALDPLSETKCTLKSFTVEKGIYQTSNFRVQPTESIVRFPNITNLCPFGEVFNATRFASVYAWNRKRISNCVADYSVLYNSASFSTFKCYGVSPTKLNDLCFTNVYADSFVIRGDEVRQIAPGQTGKIADYNYKLPDDFTGCVIAWNSNNLDSKVGGNYNYLYRLFRKSNLKPFERDISTEIYQAGSTPCNGVEGFNCYFPLQSYGFQPTNGVGYQPYRVVVLSFELLHAPATVCGPKKSTNLVKNKCVNFNFNGLTGTGVLTESNKKFLPFQQFGRDIADTTDAVRDPQTLEILDITPCSFGGVSVITPGTNTSNQVAVLYQDVNCTEVPVAIHADQLTPTWRVYSTGSNVFQTRAGCLIGAEHVNNSYECDIPIGAGICASYQTQTNSPSRAGSVASQSIIAYTMSLGAENSVAYSNNSIAIPTNFTISVTTEILPVSMTKTSVDCTMYICGDSTECSNLLLQYGSFCTQLNRALTGIAVEQDKNTQEVFAQVKQIYKTPPIKDFGGFNFSQILPDPSKPSKRSFIEDLLFNKVTLADAGFIKQYGDCLGDIAARDLICAQKFNGLTVLPPLLTDEMIAQYTSALLAGTITSGWTFGAGAALQIPFAMQMAYRFNGIGVTQNVLYENQKLIANQFNSAIGKIQDSLSSGASALGKLQDVVNQNAQALNTLVKQLSSNFGAISSVLNDILSRLDKPEAEVQIDRLITGRLQSLQTYVTQQLIRAAEIRASANLAATKMSECVLGQSKRVDFCGKGYHLMSFPQSAPHGVVFLHVTYVPAQEKNFTTAPAICHDGKAHFPREGVFVSNGTHWFVTQRNFYEPQIITTDNTFVSGNCDVVIGIVNNTVYDPLQPELDSFKEELDKYFKNHTSPDVDLGDISGINASVVNIQKEIDRLNEVAKNLNESLIDLQELGKYEQ

SEQ ID NO: 107 - protein, 1208 aa, Artificial Sequence
  source: /note="Description of Artificial Sequence: Synthetic polypeptide"
MFVFLVLLPLVSSQCVNLTTRTQLPPAYTNSFTRGVYYPDKVFRSSVLHSTQDLFLPFFSNVTWFHAIHVSGTNGTKRFDNPVLPFNDGVYFASTEKSNIIRGWIFGTTLDSKTQSLLIVNNATNVVIKVCEFQFCNDPFLGVYYHKNNKSWMESEFRVYSSANNCTFEYVSQPFLMDLEGKQGNFKNLREFVFKNIDGYFKIYSKHTPINLVRDLPQGFSALEPLVDLPIGINITRFQTLLALHRSYLTPGDSSSGWTAGAAAYYVGYLQPRTFLLKYNENGTITDAVDCALDPLSETKCTLKSFTVEKGIYQTSNFRVQPTESIVRFPNITNLCPFGEVFNATRFASVYAWNRKRISNCVADYSVLYNSASFSTFKCYGVSPTKLNDLCFTNVYADSFVIRGDEVRQIAPGQTGKIADYNYKLPDDFTGCVIAWNSNNLDSKVGGNYNYLYRLFRKSNLKPFERDISTEIYQAGSTPCNGVEGFNCYFPLQSYGFQPTNGVGYQPYRVVVLSFELLHAPATVCGPKKSTNLVKNKCVNFNFNGLTGTGVLTESNKKFLPFQQFGRDIADTTDAVRDPQTLEILDITPCSFGGVSVITPGTNTSNQVAVLYQDVNCTEVPVAIHADQLTPTWRVYSTGSNVFQTRAGCLIGAEHVNNSYECDIPIGAGICASYQTQTNSPSRAGSVASQSIIAYTMSLGAENSVAYSNNSIAIPTNFTISVTTEILPVSMTKTSVDCTMYICGDSTECSNLLLQYGSFCTQLNRALTGIAVEQDKNTQEVFAQVKQIYKTPPIKDFGGFNFSQILPDPSKPSKRSFIEDLLFNKVTLADAGFIKQYGDCLGDIAARDLICAQKFNGLTVLPPLLTDEMIAQYTSALLAGTITSGWTFGAGAALQIPFAMQMAYRFNGIGVTQNVLYENQKLIANQFNSAIGKIQDSLSSTAGALGKLQDVVNQNAQALNTLVKQLSSNFGAISSVLNDILSRLDKPEAEVQIDRLITGRLQSLQTYVTQQLIRAAEIRASANLAATKMSECVLGQSKRVDFCGKGYHLMSFPQSAPHGVVFLHVTYVPAQEKNFTTAPAICHDGKAHFPREGVFVSNGTHWFVTQRNFYEPQIITTDNTFVSGNCDVVIGIVNNTVYDPLQPELDSFKEELDKYFKNHTSPDVDLGDISGINASVVNIQKEIDRLNEVAKNLNESLIDLQELGKYEQ

SEQ ID NO: 108 - protein, 1208 aa, Artificial Sequence
  source: /note="Description of Artificial Sequence: Synthetic polypeptide"
MFVFLVLLPLVSSQCVNLTTRTQLPPAYTNSFTRGVYYPDKVFRSSVLHSTQDLFLPFFSNVTWFHAIHVSGTNGTKRFDNPVLPFNDGVYFASTEKSNIIRGWIFGTTLDSKTQSLLIVNNATNVVIKVCEFQFCNDPFLGVYYHKNNKSWMESEFRVYSSANNCTFEYVSQPFLMDLEGKQGNFKNLREFVFKNIDGYFKIYSKHTPINLVRDLPQGFSALEPLVDLPIGINITRFQTLLALHRSYLTPGDSSSGWTAGAAAYYVGYLQPRTFLLKYNENGTITDAVDCALDPLSETKCTLKSFTVEKGIYQTSNFRVQPTESIVRFPNITNLCPFGEVFNATRFASVYAWNRKRISNCVADYSVLYNSASFSTFKCYGVSPTKLNDLCFTNVYADSFVIRGDEVRQIAPGQTGKIADYNYKLPDDFTGCVIAWNSNNLDSKVGGNYNYLYRLFRKSNLKPFERDISTEIYQAGSTPCNGVEGFNCYFPLQSYGFQPTNGVGYQPYRVVVLSFELLHAPATVCGPKKSTNLVKNKCVNFNFNGLTGTGVLTESNKKFLPFQQFGRDIADTTDAVRDPQTLEILDITPCSFGGVSVITPGTNTSNQVAVLYQNVNCTEVPVAIHADQLTPTWRVYSTGSNVFQTRAGCLIGAEHVNNSYECDIPIGAGICASYQTQTNSPSRAGSVASQSIIAYTMSLGAENSVAYSNNSIAIPTNFTISVTTEILPVSMTKTSVDCTMYICGDSTECSNLLLQYGSFCTQLNRALTGIAVEQDKNTQEVFAQVKQIYKTPPIKDFGGFNFSQILPDPSKPSKRSFIEDLLFNKVTLADAGFIKQYGDCLGDIAARDLICAQKFNGLTVLPPLLTDEMIAQYTSALLAGTITSGWTFGAGPALQIPFAMQMAYRFNGIGVTQNVLYENQKLIANQFNSAIGKIQDSLSSGPSALGKLQDVVNQNAQALNTLVKQLSSNFGAISSVLNDILSRLDKPEAEVQIDRLITGRLQSLQTYVTQQLIRAAEIRASANLAATKMSECVLGQSKRVDFCGKGYHLMSFPQSAPHGVVFLHVTYVPAQEKNFTTAPAICHDGKAHFPREGVFVSNGTHWFVTQRNFYEPQIITTDNTFVSGNCDVVIGIVNNTVYDPLQPELDSFKEELDKYFKNHTSPDVDLGDISGINASVVNIQKEIDRLNEVAKNLNESLIDLQELGKYEQ

SEQ ID NO: 109 - protein, 1208 aa, Artificial Sequence
  source: /note="Description of Artificial Sequence: Synthetic polypeptide"
MFVFLVLLPLVSSQCVNLTTRTQLPPAYTNSFTRGVYYPDKVFRSSVLHSTQDLFLPFFSNVTWFHAIHVSGTNGTKRFDNPVLPFNDGVYFASTEKSNIIRGWIFGTTLDSKTQSLLIVNNATNVVIKVCEFQFCNDPFLGVYYHKNNKSWMESEFRVYSSANNCTFEYVSQPFLMDLEGKQGNFKNLREFVFKNIDGYFKIYSKHTPINLVRDLPQGFSALEPLVDLPIGINITRFQTLLALHRSYLTPGDSSSGWTAGAAAYYVGYLQPRTFLLKYNENGTITDAVDCALDPLSETKCTLKSFTVEKGIYQTSNFRVQPTESIVRFPNITNLCPFGEVFNATRFASVYAWNRKRISNCVADYSVLYNSASFSTFKCYGVSPTKLNDLCFTNVYADSFVIRGDEVRQIAPGQTGKIADYNYKLPDDFTGCVIAWNSNNLDSKVGGNYNYLYRLFRKSNLKPFERDISTEIYQAGSTPCNGVEGFNCYFPLQSYGFQPTNGVGYQPYRVVVLSFELLHAPATVCGPKKSTNLVKNKCVNFNFNGLTGTGVLTESNKKFLPFQQFGRDIADTTDAVRDPQTLEILDITPCSFGGVSVITPGTNTSNQVAVLYQNVNCTEVPVAIHADQLTPTWRVYSTGSNVFQTRAGCLIGAEHVNNSYECDIPIGAGICASYQTQTNSPSRAGSVASQSIIAYTMSLGAENSVAYSNNSIAIPTNFTISVTTEILPVSMTKTSVDCTMYICGDSTECSNLLLQYGSFCTQLNRALTGIAVEQDKNTQEVFAQVKQIYKTPPIKDFGGFNFSQILPDPSKPSKRSFIEDLLFNKVTLADAGFIKQYGDCLGDIAARDLICAQKFNGLTVLPPLLTDEMIAQYTSALLAGTITSGWTFGAGPALQIPFAMQMAYRFNGIGVTQNVLYENQKLIANQFNSAIGKIQDSLSSTPGALGKLQDVVNQNAQALNTLVKQLSSNFGAISSVLNDILSRLDKPEAEVQIDRLITGRLQSLQTYVTQQLIRAAEIRASANLAATKMSECVLGQSKRVDFCGKGYHLMSFPQSAPHGVVFLHVTYVPAQEKNFTTAPAICHDGKAHFPREGVFVSNGTHWFVTQRNFYEPQIITTDNTFVSGNCDVVIGIVNNTVYDPLQPELDSFKEELDKYFKNHTSPDVDLGDISGINASVVNIQKEIDRLNEVAKNLNESLIDLQELGKYEQ

SEQ ID NO: 110 - protein, 1208 aa, Artificial Sequence
  source: /note="Description of Artificial Sequence: Synthetic polypeptide"
MFVFLVLLPLVSSQCVNLTTRTQLPPAYTNSFTRGVYYPDKVFRSSVLHSTQDLFLPFFSNVTWFHAIHVSGTNGTKRFDNPVLPFNDGVYFASTEKSNIIRGWIFGTTLDSKTQSLLIVNNATNVVIKVCEFQFCNDPFLGVYYHKNNKSWMESEFRVYSSANNCTFEYVSQPFLMDLEGKQGNFKNLREFVFKNIDGYFKIYSKHTPINLVRDLPQGFSALEPLVDLPIGINITRFQTLLALHRSYLTPGDSSSGWTAGAAAYYVGYLQPRTFLLKYNENGTITDAVDCALDPLSETKCTLKSFTVEKGIYQTSNFRVQPTESIVRFPNITNLCPFGEVFNATRFASVYAWNRKRISNCVADYSVLYNSASFSTFKCYGVSPTKLNDLCFTNVYADSFVIRGDEVRQIAPGQTGKIADYNYKLPDDFTGCVIAWNSNNLDSKVGGNYNYLYRLFRKSNLKPFERDISTEIYQAGSTPCNGVEGFNCYFPLQSYGFQPTNGVGYQPYRVVVLSFELLHAPATVCGPKKSTNLVKNKCVNFNFNGLTGTGVLTESNKKFLPFQQFGRDIADTTDAVRDPQTLEILDITPCSFGGVSVITPGTNTSNQVAVLYQNVNCTEVPVAIHADQLTPTWRVYSTGSNVFQTRAGCLIGAEHVNNSYECDIPIGAGICASYQTQTNSPSRAGSVASQSIIAYTMSLGAENSVAYSNNSIAIPTNFTISVTTEILPVSMTKTSVDCTMYICGDSTECSNLLLQYGSFCTQLNRALTGIAVEQDKNTQEVFAQVKQIYKTPPIKDFGGFNFSQILPDPSKPSKRSFIEDLLFNKVTLADAGFIKQYGDCLGDIAARDLICAQKFNGLTVLPPLLTDEMIAQYTSALLAGTITSGWTFGAGPALQIPFAMQMAYRFNGIGVTQNVLYENQKLIANQFNSAIGKIQDSLSSGPGALGKLQDVVNQNAQALNTLVKQLSSNFGAISSVLNDILSRLDKPEAEVQIDRLITGRLQSLQTYVTQQLIRAAEIRASANLAATKMSECVLGQSKRVDFCGKGYHLMSFPQSAPHGVVFLHVTYVPAQEKNFTTAPAICHDGKAHFPREGVFVSNGTHWFVTQRNFYEPQIITTDNTFVSGNCDVVIGIVNNTVYDPLQPELDSFKEELDKYFKNHTSPDVDLGDISGINASVVNIQKEIDRLNEVAKNLNESLIDLQELGKYEQ

SEQ ID NO: 111 - protein, 1208 aa, Artificial Sequence
  source: /note="Description of Artificial Sequence: Synthetic polypeptide"
MFVFLVLLPLVSSQCVNLTTRTQLPPAYTNSFTRGVYYPDKVFRSSVLHSTQDLFLPFFSNVTWFHAIHVSGTNGTKRFDNPVLPFNDGVYFASTEKSNIIRGWIFGTTLDSKTQSLLIVNNATNVVIKVCEFQFCNDPFLGVYYHKNNKSWMESEFRVYSSANNCTFEYVSQPFLMDLEGKQGNFKNLREFVFKNIDGYFKIYSKHTPINLVRDLPQGFSALEPLVDLPIGINITRFQTLLALHRSYLTPGDSSSGWTAGAAAYYVGYLQPRTFLLKYNENGTITDAVDCALDPLSETKCTLKSFTVEKGIYQTSNFRVQPTESIVRFPNITNLCPFGEVFNATRFASVYAWNRKRISNCVADYSVLYNSASFSTFKCYGVSPTKLNDLCFTNVYADSFVIRGDEVRQIAPGQTGKIADYNYKLPDDFTGCVIAWNSNNLDSKVGGNYNYLYRLFRKSNLKPFERDISTEIYQAGSTPCNGVEGFNCYFPLQSYGFQPTNGVGYQPYRVVVLSFELLHAPATVCGPKKSTNLVKNKCVNFNFNGLTGTGVLTESNKKFLPFQQFGRDIADTTDAVRDPQTLEILDITPCSFGGVSVITPGTNTSNQVAVLYQNVNCTEVPVAIHADQLTPTWRVYSTGSNVFQTRAGCLIGAEHVNNSYECDIPIGAGICASYQTQTNSPSRAGSVASQSIIAYTMSLGAENSVAYSNNSIAIPTNFTISVTTEILPVSMTKTSVDCTMYICGDSTECSNLLLQYGSFCTQLNRALTGIAVEQDKNTQEVFAQVKQIYKTPPIKDFGGFNFSQILPDPSKPSKRSFIEDLLFNKVTLADAGFIKQYGDCLGDIAARDLICAQKFNGLTVLPPLLTDEMIAQYTSALLAGTITSGWTFGAGPALQIPFAMQMAYRFNGIGVTQNVLYENQKLIANQFNSAIGKIQDSLSSGPSPLGKLQDVVNQNAQALNTLVKQLSSNFGAISSVLNDILSRLDKPEAEVQIDRLITGRLQSLQTYVTQQLIRAAEIRASANLAATKMSECVLGQSKRVDFCGKGYHLMSFPQSAPHGVVFLHVTYVPAQEKNFTTAPAICHDGKAHFPREGVFVSNGTHWFVTQRNFYEPQIITTDNTFVSGNCDVVIGIVNNTVYDPLQPELDSFKEELDKYFKNHTSPDVDLGDISGINASVVNIQKEIDRLNEVAKNLNESLIDLQELGKYEQ

SEQ ID NO: 112 - protein, 1208 aa, Artificial Sequence
  source: /note="Description of Artificial Sequence: Synthetic polypeptide"
MFVFLVLLPLVSSQCVNLTTRTQLPPAYTNSFTRGVYYPDKVFRSSVLHSTQDLFLPFFSNVTWFHAIHVSGTNGTKRFDNPVLPFNDGVYFASTEKSNIIRGWIFGTTLDSKTQSLLIVNNATNVVIKVCEFQFCNDPFLGVYYHKNNKSWMESEFRVYSSANNCTFEYVSQPFLMDLEGKQGNFKNLREFVFKNIDGYFKIYSKHTPINLVRDLPQGFSALEPLVDLPIGINITRFQTLLALHRSYLTPGDSSSGWTAGAAAYYVGYLQPRTFLLKYNENGTITDAVDCALDPLSETKCTLKSFTVEKGIYQTSNFRVQPTESIVRFPNITNLCPFGEVFNATRFASVYAWNRKRISNCVADYSVLYNSASFSTFKCYGVSPTKLNDLCFTNVYADSFVIRGDEVRQIAPGQTGKIADYNYKLPDDFTGCVIAWNSNNLDSKVGGNYNYLYRLFRKSNLKPFERDISTEIYQAGSTPCNGVEGFNCYFPLQSYGFQPTNGVGYQPYRVVVLSFELLHAPATVCGPKKSTNLVKNKCVNFNFNGLTGTGVLTESNKKFLPFQQFGRDIADTTDAVRDPQTLEILDITPCSFGGVSVITPGTNTSNQVAVLYQNVNCTEVPVAIHADQLTPTWRVYSTGSNVFQTRAGCLIGAEHVNNSYECDIPIGAGICASYQTQTNSPSRAGSVASQSIIAYTMSLGAENSVAYSNNSIAIPTNFTISVTTEILPVSMTKTSVDCTMYICGDSTECSNLLLQYGSFCTQLNRALTGIAVEQDKNTQEVFAQVKQIYKTPPIKDFGGFNFSQILPDPSKPSKRSFIEDLLFNKVTLADAGFIKQYGDCLGDIAARDLICAQKFNGLTVLPPLLTDEMIAQYTSALLAGTITSGWTFGAGPALQIPFAMQMAYRFNGIGVTQNVLYENQKLIANQFNSAIGKIQDSLSSTPGPLGKLQDVVNQNAQALNTLVKQLSSNFGAISSVLNDILSRLDKPEAEVQIDRLITGRLQSLQTYVTQQLIRAAEIRASANLAATKMSECVLGQSKRVDFCGKGYHLMSFPQSAPHGVVFLHVTYVPAQEKNFTTAPAICHDGKAHFPREGVFVSNGTHWFVTQRNFYEPQIITTDNTFVSGNCDVVIGIVNNTVYDPLQPELDSFKEELDKYFKNHTSPDVDLGDISGINASVVNIQKEIDRLNEVAKNLNESLIDLQELGKYEQ

SEQ ID NO: 113 - protein, 1208 aa, Artificial Sequence
  source: /note="Description of Artificial Sequence: Synthetic polypeptide"
MFVFLVLLPLVSSQCVNLTTRTQLPPAYTNSFTRGVYYPDKVFRSSVLHSTQDLFLPFFSNVTWFHAIHVSGTNGTKRFDNPVLPFNDGVYFASTEKSNIIRGWIFGTTLDSKTQSLLIVNNATNVVIKVCEFQFCNDPFLGVYYHKNNKSWMESEFRVYSSANNCTFEYVSQPFLMDLEGKQGNFKNLREFVFKNIDGYFKIYSKHTPINLVRDLPQGFSALEPLVDLPIGINITRFQTLLALHRSYLTPGDSSSGWTAGAAAYYVGYLQPRTFLLKYNENGTITDAVDCALDPLSETKCTLKSFTVEKGIYQTSNFRVQPTESIVRFPNITNLCPFGEVFNATRFASVYAWNRKRISNCVADYSVLYNSASFSTFKCYGVSPTKLNDLCFTNVYADSFVIRGDEVRQIAPGQTGKIADYNYKLPDDFTGCVIAWNSNNLDSKVGGNYNYLYRLFRKSNLKPFERDISTEIYQAGSTPCNGVEGFNCYFPLQSYGFQPTNGVGYQPYRVVVLSFELLHAPATVCGPKKSTNLVKNKCVNFNFNGLTGTGVLTESNKKFLPFQQFGRDIADTTDAVRDPQTLEILDITPCSFGGVSVITPGTNTSNQVAVLYQDVNCTEVPVAIHADQLTPTWRVYSTGSNVFQTRAGCLIGAEHVNNSYECDIPIGAGICASYQTQTNSPSRAGSVASQSIIAYTMSLGAENSVAYSNNSIAIPTNFTISVTTEILPVSMTKTSVDCTMYICGDSTECSNLLLQYGSFCTQLNRALTGIAVEQDKNTQEVFAQVKQIYKTPPIKDFGGFNFSQILPDPSKPSKRSFIEDLLFNKVTLADAGFIKQYGDCLGDIAARDLICAQKFNGLTVLPPLLTDEMIAQYTSALLAGTITSGWTFGAGAALQIPFAMQMAYRFNGIGVTQNVLYENQKLIANQFNSAIGKIQDSLSSGASALGKLQDVVNQNAQALNTLVKQLSSNFGAISSVLNDILSRLDPPEAEVQIDRLITGRLQSLQTYVTQQLIRAAEIRASANLAATKMSECVLGQSKRVDFCGKGYHLMSFPQSAPHGVVFLHVTYVPAQEKNFTTAPAICHDGKAHFPREGVFVSNGTHWFVTQRNFYEPQIITTDNTFVSGNCDVVIGIVNNTVYDPLQPELDSFKEELDKYFKNHTSPDVDLGDISGINASVVNIQKEIDRLNEVAKNLNESLIDLQELGKYEQ

SEQ ID NO: 114 - protein, 1208 aa, Artificial Sequence
  source: /note="Description of Artificial Sequence: Synthetic polypeptide"
MFVFLVLLPLVSSQCVNLTTRTQLPPAYTNSFTRGVYYPDKVFRSSVLHSTQDLFLPFFSNVTWFHAIHVSGTNGTKRFDNPVLPFNDGVYFASTEKSNIIRGWIFGTTLDSKTQSLLIVNNATNVVIKVCEFQFCNDPFLGVYYHKNNKSWMESEFRVYSSANNCTFEYVSQPFLMDLEGKQGNFKNLREFVFKNIDGYFKIYSKHTPINLVRDLPQGFSALEPLVDLPIGINITRFQTLLALHRSYLTPGDSSSGWTAGAAAYYVGYLQPRTFLLKYNENGTITDAVDCALDPLSETKCTLKSFTVEKGIYQTSNFRVQPTESIVRFPNITNLCPFGEVFNATRFASVYAWNRKRISNCVADYSVLYNSASFSTFKCYGVSPTKLNDLCFTNVYADSFVIRGDEVRQIAPGQTGKIADYNYKLPDDFTGCVIAWNSNNLDSKVGGNYNYLYRLFRKSNLKPFERDISTEIYQAGSTPCNGVEGFNCYFPLQSYGFQPTNGVGYQPYRVVVLSFELLHAPATVCGPKKSTNLVKNKCVNFNFNGLTGTGVLTESNKKFLPFQQFGRDIADTTDAVRDPQTLEILDITPCSFGGVSVITPGTNTSNQVAVLYQDVNCTEVPVAIHADQLTPTWRVYSTGSNVFQTRAGCLIGAEHVNNSYECDIPIGAGICASYQTQTNSPSRAGSVASQSIIAYTMSLGAENSVAYSNNSIAIPTNFTISVTTEILPVSMTKTSVDCTMYICGDSTECSNLLLQYGSFCTQLNRALTGIAVEQDKNTQEVFAQVKQIYKTPPIKDFGGFNFSQILPDPSKPSKRSFIEDLLFNKVTLADAGFIKQYGDCLGDIAARDLICAQKFNGLTVLPPLLTDEMIAQYTSALLAGTITSGWTFGAGAALQIPFAMQMAYRFNGIGVTQNVLYENQKLIANQFNSAIGKIQDSLSSTAGALGKLQDVVNQNAQALNTLVKQLSSNFGAISSVLNDILSRLDPPEAEVQIDRLITGRLQSLQTYVTQQLIRAAEIRASANLAATKMSECVLGQSKRVDFCGKGYHLMSFPQSAPHGVVFLHVTYVPAQEKNFTTAPAICHDGKAHFPREGVFVSNGTHWFVTQRNFYEPQIITTDNTFVSGNCDVVIGIVNNTVYDPLQPELDSFKEELDKYFKNHTSPDVDLGDISGINASVVNIQKEIDRLNEVAKNLNESLIDLQELGKYEQ

SEQ ID NO: 115 - protein, 1208 aa, Artificial Sequence
  source: /note="Description of Artificial Sequence: Synthetic polypeptide"
MFVFLVLLPLVSSQCVNLTTRTQLPPAYTNSFTRGVYYPDKVFRSSVLHSTQDLFLPFFSNVTWFHAIHVSGTNGTKRFDNPVLPFNDGVYFASTEKSNIIRGWIFGTTLDSKTQSLLIVNNATNVVIKVCEFQFCNDPFLGVYYHKNNKSWMESEFRVYSSANNCTFEYVSQPFLMDLEGKQGNFKNLREFVFKNIDGYFKIYSKHTPINLVRDLPQGFSALEPLVDLPIGINITRFQTLLALHRSYLTPGDSSSGWTAGAAAYYVGYLQPRTFLLKYNENGTITDAVDCALDPLSETKCTLKSFTVEKGIYQTSNFRVQPTESIVRFPNITNLCPFGEVFNATRFASVYAWNRKRISNCVADYSVLYNSASFSTFKCYGVSPTKLNDLCFTNVYADSFVIRGDEVRQIAPGQTGKIADYNYKLPDDFTGCVIAWNSNNLDSKVGGNYNYLYRLFRKSNLKPFERDISTEIYQAGSTPCNGVEGFNCYFPLQSYGFQPTNGVGYQPYRVVVLSFELLHAPATVCGPKKSTNLVKNKCVNFNFNGLTGTGVLTESNKKFLPFQQFGRDIADTTDAVRDPQTLEILDITPCSFGGVSVITPGTNTSNQVAVLYQNVNCTEVPVAIHADQLTPTWRVYSTGSNVFQTRAGCLIGAEHVNNSYECDIPIGAGICASYQTQTNSPSRAGSVASQSIIAYTMSLGAENSVAYSNNSIAIPTNFTISVTTEILPVSMTKTSVDCTMYICGDSTECSNLLLQYGSFCTQLNRALTGIAVEQDKNTQEVFAQVKQIYKTPPIKDFGGFNFSQILPDPSKPSKRSFIEDLLFNKVTLADAGFIKQYGDCLGDIAARDLICAQKFNGLTVLPPLLTDEMIAQYTSALLAGTITSGWTFGAGPALQIPFAMQMAYRFNGIGVTQNVLYENQKLIANQFNSAIGKIQDSLSSGPSALGKLQDVVNQNAQALNTLVKQLSSNFGAISSVLNDILSRLDPPEAEVQIDRLITGRLQSLQTYVTQQLIRAAEIRASANLAATKMSECVLGQSKRVDFCGKGYHLMSFPQSAPHGVVFLHVTYVPAQEKNFTTAPAICHDGKAHFPREGVFVSNGTHWFVTQRNFYEPQIITTDNTFVSGNCDVVIGIVNNTVYDPLQPELDSFKEELDKYFKNHTSPDVDLGDISGINASVVNIQKEIDRLNEVAKNLNESLIDLQELGKYEQ

SEQ ID NO: 116 - protein, 1208 aa, Artificial Sequence
  source: /note="Description of Artificial Sequence: Synthetic polypeptide"
MFVFLVLLPLVSSQCVNLTTRTQLPPAYTNSFTRGVYYPDKVFRSSVLHSTQDLFLPFFSNVTWFHAIHVSGTNGTKRFDNPVLPFNDGVYFASTEKSNIIRGWIFGTTLDSKTQSLLIVNNATNVVIKVCEFQFCNDPFLGVYYHKNNKSWMESEFRVYSSANNCTFEYVSQPFLMDLEGKQGNFKNLREFVFKNIDGYFKIYSKHTPINLVRDLPQGFSALEPLVDLPIGINITRFQTLLALHRSYLTPGDSSSGWTAGAAAYYVGYLQPRTFLLKYNENGTITDAVDCALDPLSETKCTLKSFTVEKGIYQTSNFRVQPTESIVRFPNITNLCPFGEVFNATRFASVYAWNRKRISNCVADYSVLYNSASFSTFKCYGVSPTKLNDLCFTNVYADSFVIRGDEVRQIAPGQTGKIADYNYKLPDDFTGCVIAWNSNNLDSKVGGNYNYLYRLFRKSNLKPFERDISTEIYQAGSTPCNGVEGFNCYFPLQSYGFQPTNGVGYQPYRVVVLSFELLHAPATVCGPKKSTNLVKNKCVNFNFNGLTGTGVLTESNKKFLPFQQFGRDIADTTDAVRDPQTLEILDITPCSFGGVSVITPGTNTSNQVAVLYQNVNCTEVPVAIHADQLTPTWRVYSTGSNVFQTRAGCLIGAEHVNNSYECDIPIGAGICASYQTQTNSPSRAGSVASQSIIAYTMSLGAENSVAYSNNSIAIPTNFTISVTTEILPVSMTKTSVDCTMYICGDSTECSNLLLQYGSFCTQLNRALTGIAVEQDKNTQEVFAQVKQIYKTPPIKDFGGFNFSQILPDPSKPSKRSFIEDLLFNKVTLADAGFIKQYGDCLGDIAARDLICAQKFNGLTVLPPLLTDEMIAQYTSALLAGTITSGWTFGAGPALQIPFAMQMAYRFNGIGVTQNVLYENQKLIANQFNSAIGKIQDSLSSTPGALGKLQDVVNQNAQALNTLVKQLSSNFGAISSVLNDILSRLDPPEAEVQIDRLITGRLQSLQTYVTQQLIRAAEIRASANLAATKMSECVLGQSKRVDFCGKGYHLMSFPQSAPHGVVFLHVTYVPAQEKNFTTAPAICHDGKAHFPREGVFVSNGTHWFVTQRNFYEPQIITTDNTFVSGNCDVVIGIVNNTVYDPLQPELDSFKEELDKYFKNHTSPDVDLGDISGINASVVNIQKEIDRLNEVAKNLNESLIDLQELGKYEQ

SEQ ID NO: 117 - protein, 1208 aa, Artificial Sequence
  source: /note="Description of Artificial Sequence: Synthetic polypeptide"
MFVFLVLLPLVSSQCVNLTTRTQLPPAYTNSFTRGVYYPDKVFRSSVLHSTQDLFLPFFSNVTWFHAIHVSGTNGTKRFDNPVLPFNDGVYFASTEKSNIIRGWIFGTTLDSKTQSLLIVNNATNVVIKVCEFQFCNDPFLGVYYHKNNKSWMESEFRVYSSANNCTFEYVSQPFLMDLEGKQGNFKNLREFVFKNIDGYFKIYSKHTPINLVRDLPQGFSALEPLVDLPIGINITRFQTLLALHRSYLTPGDSSSGWTAGAAAYYVGYLQPRTFLLKYNENGTITDAVDCALDPLSETKCTLKSFTVEKGIYQTSNFRVQPTESIVRFPNITNLCPFGEVFNATRFASVYAWNRKRISNCVADYSVLYNSASFSTFKCYGVSPTKLNDLCFTNVYADSFVIRGDEVRQIAPGQTGKIADYNYKLPDDFTGCVIAWNSNNLDSKVGGNYNYLYRLFRKSNLKPFERDISTEIYQAGSTPCNGVEGFNCYFPLQSYGFQPTNGVGYQPYRVVVLSFELLHAPATVCGPKKSTNLVKNKCVNFNFNGLTGTGVLTESNKKFLPFQQFGRDIADTTDAVRDPQTLEILDITPCSFGGVSVITPGTNTSNQVAVLYQNVNCTEVPVAIHADQLTPTWRVYSTGSNVFQTRAGCLIGAEHVNNSYECDIPIGAGICASYQTQTNSPSRAGSVASQSIIAYTMSLGAENSVAYSNNSIAIPTNFTISVTTEILPVSMTKTSVDCTMYICGDSTECSNLLLQYGSFCTQLNRALTGIAVEQDKNTQEVFAQVKQIYKTPPIKDFGGFNFSQILPDPSKPSKRSFIEDLLFNKVTLADAGFIKQYGDCLGDIAARDLICAQKFNGLTVLPPLLTDEMIAQYTSALLAGTITSGWTFGAGPALQIPFAMQMAYRFNGIGVTQNVLYENQKLIANQFNSAIGKIQDSLSSGPGALGKLQDVVNQNAQALNTLVKQLSSNFGAISSVLNDILSRLDPPEAEVQIDRLITGRLQSLQTYVTQQLIRAAEIRASANLAATKMSECVLGQSKRVDFCGKGYHLMSFPQSAPHGVVFLHVTYVPAQEKNFTTAPAICHDGKAHFPREGVFVSNGTHWFVTQRNFYEPQIITTDNTFVSGNCDVVIGIVNNTVYDPLQPELDSFKEELDKYFKNHTSPDVDLGDISGINASVVNIQKEIDRLNEVAKNLNESLIDLQELGKYEQ

SEQ ID NO: 118 - protein, 1208 aa, Artificial Sequence
  source: /note="Description of Artificial Sequence: Synthetic polypeptide"
MFVFLVLLPLVSSQCVNLTTRTQLPPAYTNSFTRGVYYPDKVFRSSVLHSTQDLFLPFFSNVTWFHAIHVSGTNGTKRFDNPVLPFNDGVYFASTEKSNIIRGWIFGTTLDSKTQSLLIVNNATNVVIKVCEFQFCNDPFLGVYYHKNNKSWMESEFRVYSSANNCTFEYVSQPFLMDLEGKQGNFKNLREFVFKNIDGYFKIYSKHTPINLVRDLPQGFSALEPLVDLPIGINITRFQTLLALHRSYLTPGDSSSGWTAGAAAYYVGYLQPRTFLLKYNENGTITDAVDCALDPLSETKCTLKSFTVEKGIYQTSNFRVQPTESIVRFPNITNLCPFGEVFNATRFASVYAWNRKRISNCVADYSVLYNSASFSTFKCYGVSPTKLNDLCFTNVYADSFVIRGDEVRQIAPGQTGKIADYNYKLPDDFTGCVIAWNSNNLDSKVGGNYNYLYRLFRKSNLKPFERDISTEIYQAGSTPCNGVEGFNCYFPLQSYGFQPTNGVGYQPYRVVVLSFELLHAPATVCGPKKSTNLVKNKCVNFNFNGLTGTGVLTESNKKFLPFQQFGRDIADTTDAVRDPQTLEILDITPCSFGGVSVITPGTNTSNQVAVLYQNVNCTEVPVAIHADQLTPTWRVYSTGSNVFQTRAGCLIGAEHVNNSYECDIPIGAGICASYQTQTNSPSRAGSVASQSIIAYTMSLGAENSVAYSNNSIAIPTNFTISVTTEILPVSMTKTSVDCTMYICGDSTECSNLLLQYGSFCTQLNRALTGIAVEQDKNTQEVFAQVKQIYKTPPIKDFGGFNFSQILPDPSKPSKRSFIEDLLFNKVTLADAGFIKQYGDCLGDIAARDLICAQKFNGLTVLPPLLTDEMIAQYTSALLAGTITSGWTFGAGPALQIPFAMQMAYRFNGIGVTQNVLYENQKLIANQFNSAIGKIQDSLSSGPSPLGKLQDVVNQNAQALNTLVKQLSSNFGAISSVLNDILSRLDPPEAEVQIDRLITGRLQSLQTYVTQQLIRAAEIRASANLAATKMSECVLGQSKRVDFCGKGYHLMSFPQSAPHGVVFLHVTYVPAQEKNFTTAPAICHDGKAHFPREGVFVSNGTHWFVTQRNFYEPQIITTDNTFVSGNCDVVIGIVNNTVYDPLQPELDSFKEELDKYFKNHTSPDVDLGDISGINASVVNIQKEIDRLNEVAKNLNESLIDLQELGKYEQ

SEQ ID NO: 119 - protein, 1208 aa, Artificial Sequence
  source: /note="Description of Artificial Sequence: Synthetic polypeptide"
MFVFLVLLPLVSSQCVNLTTRTQLPPAYTNSFTRGVYYPDKVFRSSVLHSTQDLFLPFFSNVTWFHAIHVSGTNGTKRFDNPVLPFNDGVYFASTEKSNIIRGWIFGTTLDSKTQSLLIVNNATNVVIKVCEFQFCNDPFLGVYYHKNNKSWMESEFRVYSSANNCTFEYVSQPFLMDLEGKQGNFKNLREFVFKNIDGYFKIYSKHTPINLVRDLPQGFSALEPLVDLPIGINITRFQTLLALHRSYLTPGDSSSGWTAGAAAYYVGYLQPRTFLLKYNENGTITDAVDCALDPLSETKCTLKSFTVEKGIYQTSNFRVQPTESIVRFPNITNLCPFGEVFNATRFASVYAWNRKRISNCVADYSVLYNSASFSTFKCYGVSPTKLNDLCFTNVYADSFVIRGDEVRQIAPGQTGKIADYNYKLPDDFTGCVIAWNSNNLDSKVGGNYNYLYRLFRKSNLKPFERDISTEIYQAGSTPCNGVEGFNCYFPLQSYGFQPTNGVGYQPYRVVVLSFELLHAPATVCGPKKSTNLVKNKCVNFNFNGLTGTGVLTESNKKFLPFQQFGRDIADTTDAVRDPQTLEILDITPCSFGGVSVITPGTNTSNQVAVLYQNVNCTEVPVAIHADQLTPTWRVYSTGSNVFQTRAGCLIGAEHVNNSYECDIPIGAGICASYQTQTNSPSRAGSVASQSIIAYTMSLGAENSVAYSNNSIAIPTNFTISVTTEILPVSMTKTSVDCTMYICGDSTECSNLLLQYGSFCTQLNRALTGIAVEQDKNTQEVFAQVKQIYKTPPIKDFGGFNFSQILPDPSKPSKRSFIEDLLFNKVTLADAGFIKQYGDCLGDIAARDLICAQKFNGLTVLPPLLTDEMIAQYTSALLAGTITSGWTFGAGPALQIPFAMQMAYRFNGIGVTQNVLYENQKLIANQFNSAIGKIQDSLSSTPGPLGKLQDVVNQNAQALNTLVKQLSSNFGAISSVLNDILSRLDPPEAEVQIDRLITGRLQSLQTYVTQQLIRAAEIRASANLAATKMSECVLGQSKRVDFCGKGYHLMSFPQSAPHGVVFLHVTYVPAQEKNFTTAPAICHDGKAHFPREGVFVSNGTHWFVTQRNFYEPQIITTDNTFVSGNCDVVIGIVNNTVYDPLQPELDSFKEELDKYFKNHTSPDVDLGDISGINASVVNIQKEIDRLNEVAKNLNESLIDLQELGKYEQ

SEQ ID NO: 120 - protein, 35 aa, Artificial Sequence
  source: /note="Description of Artificial Sequence: Synthetic polypeptide"
GGGGSGGGGSGGGGSGGGGSGGGGSGGGGSGGGGS
